United States Patent Application Publication US 2021/0340625 A1 - sequence listing, part 2

SEQ ID NO: 36915 - DNA, 26 bp, Homo Sapiens
gagaaagctcacaagaactgctaact

SEQ ID NO: 36916 - DNA, 27 bp, Homo Sapiens
gagaaagctcacaagaactgctaactc

SEQ ID NO: 36917 - DNA, 28 bp, Homo Sapiens
gagaaagctcacaagaactgctaactca

SEQ ID NO: 36918 - DNA, 30 bp, Homo Sapiens; identical to SEQ ID NO: 15485

SEQ ID NO: 36919 - DNA, 32 bp, Homo Sapiens; identical to SEQ ID NO: 15487

SEQ ID NO: 36920 - DNA, 33 bp, Homo Sapiens; identical to SEQ ID NO: 15488

SEQ ID NO: 36921 - DNA, 34 bp, Homo Sapiens; identical to SEQ ID NO: 15489

SEQ ID NO: 36922 - DNA, 35 bp, Homo Sapiens; identical to SEQ ID NO: 15490

SEQ ID NO: 36923 - DNA, 36 bp, Homo Sapiens; identical to SEQ ID NO: 15491

SEQ ID NO: 36924 - DNA, 38 bp, Homo Sapiens; identical to SEQ ID NO: 15493

SEQ ID NO: 36925 - DNA, 41 bp, Homo Sapiens; identical to SEQ ID NO: 15496

SEQ ID NO: 36926 - DNA, 44 bp, Homo Sapiens; identical to SEQ ID NO: 15499

SEQ ID NO: 36927 - DNA, 26 bp, Homo Sapiens
gagaaccaacacctctttacagtgac

SEQ ID NO: 36928 - DNA, 31 bp, Homo Sapiens; identical to SEQ ID NO: 15532

SEQ ID NO: 36929 - DNA, 32 bp, Homo Sapiens; identical to SEQ ID NO: 15533

SEQ ID NO: 36930 - DNA, 27 bp, Homo Sapiens
gagaccggggttcgattccccgacggg

SEQ ID NO: 36931 - DNA, 28 bp, Homo Sapiens
gagaccggggttcgattccccgacgggg

SEQ ID NO: 36932 - DNA, 29 bp, Homo Sapiens
gagaccggggttcgattccccgacgggga

SEQ ID NO: 36933 - DNA, 30 bp, Homo Sapiens; identical to SEQ ID NO: 15542

SEQ ID NO: 36934 - DNA, 31 bp, Homo Sapiens; identical to SEQ ID NO: 15543

SEQ ID NO: 36935 - DNA, 32 bp, Homo Sapiens; identical to SEQ ID NO: 15544

SEQ ID NO: 36936 - DNA, 33 bp, Homo Sapiens; identical to SEQ ID NO: 15545

SEQ ID NO: 36937 - DNA, 16 bp, Homo Sapiens
gagagcattagactga

SEQ ID NO: 36938 - DNA, 16 bp, Homo Sapiens
gagagcgttagactga

SEQ ID NO: 36939 - DNA, 16 bp, Homo Sapiens
gagaggtcccgggttc

SEQ ID NO: 36940 - DNA, 31 bp, Homo Sapiens; identical to SEQ ID NO: 15554

SEQ ID NO: 36941 - DNA, 32 bp, Homo Sapiens; identical to SEQ ID NO: 15555

SEQ ID NO: 36942 - DNA, 33 bp, Homo Sapiens; identical to SEQ ID NO: 15556

SEQ ID NO: 36943 - DNA, 34 bp, Homo Sapiens; identical to SEQ ID NO: 15557

SEQ ID NO: 36944 - DNA, 36 bp, Homo Sapiens
gagaggtcccgggttcaaatcccggacgagccccca

SEQ ID NO: 36945 - DNA, 29 bp, Homo Sapiens
gagatcctgggttcgaatcccagcggggc

SEQ ID NO: 36946 - DNA, 33 bp, Homo Sapiens; identical to SEQ ID NO: 15562

SEQ ID NO: 36947 - DNA, 25 bp, Homo Sapiens
gagatgaaaacctttttccaaggac

SEQ ID NO: 36948 - DNA, 26 bp, Homo Sapiens
gagatgaaaacctttttccaaggaca

SEQ ID NO: 36949 - DNA, 27 bp, Homo Sapiens
gagatgaaaacctttttccaaggacac

SEQ ID NO: 36950 - DNA, 28 bp, Homo Sapiens
gagatgaaaacctttttccaaggacacc

SEQ ID NO: 36951 - DNA, 29 bp, Homo Sapiens
gagatgaaaacctttttccaaggacacca

SEQ ID NO: 36952 - DNA, 28 bp, Homo Sapiens
gagatttcaacttaacttgaccgctctg

SEQ ID NO: 36953 - DNA, 29 bp, Homo Sapiens
gagatttcaacttaacttgaccgctctga

SEQ ID NO: 36954 - DNA, 30 bp, Homo Sapiens; identical to SEQ ID NO: 15583

SEQ ID NO: 36955 - DNA, 31 bp, Homo Sapiens; identical to SEQ ID NO: 15584

SEQ ID NO: 36956 - DNA, 32 bp, Homo Sapiens; identical to SEQ ID NO: 15585

SEQ ID NO: 36957 - DNA, 32 bp, Homo Sapiens; identical to SEQ ID NO: 15595

SEQ ID NO: 36958 - DNA, 33 bp, Homo Sapiens
gagcatagctgccttccaagcagttgacccggg

SEQ ID NO: 36959 - DNA, 20 bp, Homo Sapiens
gagcatgggactcttaatcc

SEQ ID NO: 36960 - DNA, 21 bp, Homo Sapiens
gagcatgggactcttaatccc

SEQ ID NO: 36961 - DNA, 34 bp, Homo Sapiens; identical to SEQ ID NO: 15608

SEQ ID NO: 36962 - DNA, 36 bp, Homo Sapiens; identical to SEQ ID NO: 15610

SEQ ID NO: 36963 - DNA, 19 bp, Homo Sapiens
gagcccacccagggacgcc

SEQ ID NO: 36964 - DNA, 16 bp, Homo Sapiens
gagccccacgttgggc

SEQ ID NO: 36965 - DNA, 16 bp, Homo Sapiens
gagccccagtggaacc

SEQ ID NO: 36966 - DNA, 17 bp, Homo Sapiens
gagccccagtggaacca

SEQ ID NO: 36967 - DNA, 18 bp, Homo Sapiens
gagccccagtggaaccac

SEQ ID NO: 36968 - DNA, 19 bp, Homo Sapiens
gagccccagtggaaccacc

SEQ ID NO: 36969 - DNA, 17 bp, Homo Sapiens
gagcggtctaaggcgct

SEQ ID NO: 36970 - DNA, 18 bp, Homo Sapiens
gagcggtctaaggcgctg

SEQ ID NO: 36971 - DNA, 22 bp, Homo Sapiens
gagcggtctaaggcgctggatt

SEQ ID NO: 36972 - DNA, 21 bp, Homo Sapiens
gagctggggattgtgggttcg

SEQ ID NO: 36973 - DNA, 38 bp, Homo Sapiens; identical to SEQ ID NO: 15643

SEQ ID NO: 36974 - DNA, 39 bp, Homo Sapiens; identical to SEQ ID NO: 15644

SEQ ID NO: 36975 - DNA, 32 bp, Homo Sapiens
gaggccccgggttcgatccccggcatctccac

SEQ ID NO: 36976 - DNA, 33 bp, Homo Sapiens
gaggccccgggttcgatccccggcatctccacc

SEQ ID NO: 36977 - DNA, 25 bp, Homo Sapiens
gaggcttacgaccccttatttaccc

SEQ ID NO: 36978 - DNA, 26 bp, Homo Sapiens
gaggcttacgaccccttatttacccc

SEQ ID NO: 36979 - DNA, 27 bp, Homo Sapiens
gaggcttacgaccccttatttacccca

SEQ ID NO: 36980 - DNA, 34 bp, Homo Sapiens
gagggtccagggttcaagtccctgtccaggcgcc

SEQ ID NO: 36981 - DNA, 31 bp, Homo Sapiens; identical to SEQ ID NO: 15682

SEQ ID NO: 36982 - DNA, 32 bp, Homo Sapiens; identical to SEQ ID NO: 15683

SEQ ID NO: 36983 - DNA, 33 bp, Homo Sapiens; identical to SEQ ID NO: 15684

SEQ ID NO: 36984 - DNA, 34 bp, Homo Sapiens; identical to SEQ ID NO: 15685

SEQ ID NO: 36985 - DNA, 27 bp, Homo Sapiens
gagggttcgaatcccttcgtggttgcc

SEQ ID NO: 36986 - DNA, 26 bp, Homo Sapiens
gagggttcgagtcccttcgtggtcgc

SEQ ID NO: 36987 - DNA, 27 bp, Homo Sapiens
gagggttcgagtcccttcgtggtcgcc

SEQ ID NO: 36988 - DNA, 31 bp, Homo Sapiens
gaggtcccgggttcaaatcccggacgagccc

SEQ ID NO: 36989 - DNA, 32 bp, Homo Sapiens
gaggtcccgggttcaaatcccggacgagcccc

SEQ ID NO: 36990 - DNA, 32 bp, Homo Sapiens
gaggtcccgggttcgatccccagcatctccac

SEQ ID NO: 36991 - DNA, 19 bp, Homo Sapiens
gaggtcgatggatcgaaac

SEQ ID NO: 36992 - DNA, 20 bp, Homo Sapiens
gaggtcgatggatcgaaacc

SEQ ID NO: 36993 - DNA, 21 bp, Homo Sapiens
gaggtcgatggatcgaaacca

SEQ ID NO: 36994 - DNA, 33 bp, Homo Sapiens
gaggtcgatggatcgaaaccatcctctgctacc

SEQ ID NO: 36995 - DNA, 21 bp, Homo Sapiens
gaggtggccgagtggttaagg

SEQ ID NO: 36996 - DNA, 24 bp, Homo Sapiens
gaggttccgggttcgagtcccggc

SEQ ID NO: 36997 - DNA, 17 bp, Homo Sapiens
gagtcccggcggagtcg

SEQ ID NO: 36998 - DNA, 18 bp, Homo Sapiens
gagtcccggcggagtcgc

SEQ ID NO: 36999 - DNA, 18 bp, Homo Sapiens
gagtcctgccgcggtcgc

SEQ ID NO: 37000 - DNA, 19 bp, Homo Sapiens
gagtcctgccgcggtcgcc

SEQ ID NO: 37001 - DNA, 16 bp, Homo Sapiens
gagtgaagcattggac

SEQ ID NO: 37002 - DNA, 17 bp, Homo Sapiens
gagtgaagcattggact

SEQ ID NO: 37003 - DNA, 19 bp, Homo Sapiens
gagtgaagcattggactgt

SEQ ID NO: 37004 - DNA, 20 bp, Homo Sapiens
gagtgaagcattggactgta

SEQ ID NO: 37005 - DNA, 22 bp, Homo Sapiens
gagtgaagcattggactgtaaa

SEQ ID NO: 37006 - DNA, 28 bp, Homo Sapiens
gagtgaagcattggactgtaaatctaaa

SEQ ID NO: 37007 - DNA, 44 bp, Homo Sapiens; identical to SEQ ID NO: 15765

SEQ ID NO: 37008 - DNA, 45 bp, Homo Sapiens; identical to SEQ ID NO: 15766

SEQ ID NO: 37009 - DNA, 17 bp, Homo Sapiens
gagtggcgcagcggaag

SEQ ID NO: 37010 - DNA, 18 bp, Homo Sapiens
gagtggcgcagcggaagc

SEQ ID NO: 37011 - DNA, 19 bp, Homo Sapiens
gagtggcgcagcggaagcg

SEQ ID NO: 37012 - DNA, 23 bp, Homo Sapiens
gagtggcgcagcggaagcgtgct

SEQ ID NO: 37013 - DNA, 27 bp, Homo Sapiens
gagtggcgcagcggaagcgtgctgggc

SEQ ID NO: 37014 - DNA, 29 bp, Homo Sapiens
gagtggcgcagcggaagcgtgctgggccc

SEQ ID NO: 37015 - DNA, 35 bp, Homo Sapiens; identical to SEQ ID NO: 15776

SEQ ID NO: 37016 - DNA, 18 bp, Homo Sapiens
gagtggggttttgcagtc

SEQ ID NO: 37017 - DNA, 16 bp, Homo Sapiens
gagtggtctaaggcgc

SEQ ID NO: 37018 - DNA, 23 bp, Homo Sapiens
gagtggtctaaggcgccagactc

SEQ ID NO: 37019 - DNA, 17 bp, Homo Sapiens
gagtggtctaaggcgct

SEQ ID NO: 37020 - DNA, 20 bp, Homo Sapiens
gagtggttaaggcattggac

SEQ ID NO: 37021 - DNA, 23 bp, Homo Sapiens
gagttaaagactttttctctgac

SEQ ID NO: 37022 - DNA, 24 bp, Homo Sapiens
gagttaaagactttttctctgacc

SEQ ID NO: 37023 - DNA, 25 bp, Homo Sapiens
gagttaaagactttttctctgacca

SEQ ID NO: 37024 - DNA, 24 bp, Homo Sapiens
gagttcaaatctcgctggggcctc

SEQ ID NO: 37025 - DNA, 23 bp, Homo Sapiens
gagttcaaatctcggtggaacct

SEQ ID NO: 37026 - DNA, 24 bp, Homo Sapiens
gagttcaaatctcggtggaacctc

SEQ ID NO: 37027 - DNA, 25 bp, Homo Sapiens
gagttcaaatctcggtggaacctcc

SEQ ID NO: 37028 - DNA, 21 bp, Homo Sapiens
gagttcaaatctcggtgggac

SEQ ID NO: 37029 - DNA, 23 bp, Homo Sapiens
gagttcaaatctcggtgggacct

SEQ ID NO: 37030 - DNA, 24 bp, Homo Sapiens
gagttcaaatctcggtgggacctc

SEQ ID NO: 37031 - DNA, 21 bp, Homo Sapiens
gagttcgaatctcggtgggac

SEQ ID NO: 37032 - DNA, 23 bp, Homo Sapiens
gagttcgaatctcggtgggacct

SEQ ID NO: 37033 - DNA, 24 bp, Homo Sapiens
gagttcgaatctcggtgggacctc

SEQ ID NO: 37034 - DNA, 23 bp, Homo Sapiens
gagttcgagtctcggtggaacct

SEQ ID NO: 37035 - DNA, 24 bp, Homo Sapiens
gagttcgatcctcgctggggcctc

SEQ ID NO: 37036 - DNA, 39 bp, Homo Sapiens; identical to SEQ ID NO: 15835

SEQ ID NO: 37037 - DNA, 46 bp, Homo Sapiens
gataaaagagttactttgatagagtaaataataggagcttaaaccc

SEQ ID NO: 37038 - DNA, 16 bp, Homo Sapiens
gataacgcgtctgact

SEQ ID NO: 37039 - DNA, 16 bp, Homo Sapiens
gataaggcgtctgatt

SEQ ID NO: 37040 - DNA, 17 bp, Homo Sapiens
gatagctcagtcggtag

SEQ ID NO: 37041 - DNA, 18 bp, Homo Sapiens
gatagctcagtcggtaga

SEQ ID NO: 37042 - DNA, 19 bp, Homo Sapiens
gatagctcagtcggtagag

SEQ ID NO: 37043 - DNA, 27 bp, Homo Sapiens
gatagctcagtcggtagagcatcagac

SEQ ID NO: 37044 - DNA, 28 bp, Homo Sapiens
gatagctcagtcggtagagcatcagact

SEQ ID NO: 37045 - DNA, 29 bp, Homo Sapiens
gatcacgggttcgaaccccgtccgtgcct

SEQ ID NO: 37046 - DNA, 20 bp, Homo Sapiens
gatcagaagattctaggttc

SEQ ID NO: 37047 - DNA, 21 bp, Homo Sapiens
gatcagaagattctaggttcg

SEQ ID NO: 37048 - DNA, 39 bp, Homo Sapiens; identical to SEQ ID NO: 15914

SEQ ID NO: 37049 - DNA, 40 bp, Homo Sapiens; identical to SEQ ID NO: 15915

SEQ ID NO: 37050 - DNA, 19 bp, Homo Sapiens
gatcagaagattgagggtt

SEQ ID NO: 37051 - DNA, 38 bp, Homo Sapiens; identical to SEQ ID NO: 15923

SEQ ID NO: 37052 - DNA, 39 bp, Homo Sapiens; identical to SEQ ID NO: 15924

SEQ ID NO: 37053 - DNA, 20 bp, Homo Sapiens
gatcagaagattgcaggttc

SEQ ID NO: 37054 - DNA, 39 bp, Homo Sapiens; identical to SEQ ID NO: 15929

SEQ ID NO: 37055 - DNA, 20 bp, Homo Sapiens
gatcagaaggctgcgtgttc

SEQ ID NO: 37056 - DNA, 38 bp, Homo Sapiens; identical to SEQ ID NO: 15936

SEQ ID NO: 37057 - DNA, 39 bp, Homo Sapiens; identical to SEQ ID NO: 15937

SEQ ID NO: 37058 - DNA, 38 bp, Homo Sapiens; identical to SEQ ID NO: 15951

SEQ ID NO: 37059 - DNA, 19 bp, Homo Sapiens
gatccccagcatctccacc

SEQ ID NO: 37060 - DNA, 18 bp, Homo Sapiens
gatccccggcatctccac

SEQ ID NO: 37061 - DNA, 19 bp, Homo Sapiens
gatccccggcatctccacc

SEQ ID NO: 37062 - DNA, 16 bp, Homo Sapiens
gatccccgtacgggcc

SEQ ID NO: 37063 - DNA, 19 bp, Homo Sapiens
gatccccgtacgggccacc

SEQ ID NO: 37064 - DNA, 18 bp, Homo Sapiens
gatcccgggcggaaacac

SEQ ID NO: 37065 - DNA, 19 bp, Homo Sapiens
gatcccgggcggaaacacc

SEQ ID NO: 37066 - DNA, 18 bp, Homo Sapiens
gatcccgggtttcggcac

SEQ ID NO: 37067 - DNA, 19 bp, Homo Sapiens
gatcccgggtttcggcacc

SEQ ID NO: 37068 - DNA, 29 bp, Homo Sapiens
gatccgagttcaaatctcggtgggacctc

SEQ ID NO: 37069 - DNA, 18 bp, Homo Sapiens
gatcctcgctggggcctc

SEQ ID NO: 37070 - DNA, 30 bp, Homo Sapiens
gatcctgggttcgaatcccagcggggcctc

SEQ ID NO: 37071 - DNA, 31 bp, Homo Sapiens; identical to SEQ ID NO: 15971

SEQ ID NO: 37072 - DNA, 16 bp, Homo Sapiens
gatccttaggtcgctg

SEQ ID NO: 37073 - DNA, 20 bp, Homo Sapiens
gatccttaggtcgctggttc

SEQ ID NO: 37074 - DNA, 21 bp, Homo Sapiens
gatccttaggtcgctggttcg

SEQ ID NO: 37075 - DNA, 23 bp, Homo Sapiens
gatcgaaaccatcctctgctacc

SEQ ID NO: 37076 - DNA, 23 bp, Homo Sapiens
gatcgatgcccgcatcctccacc

SEQ ID NO: 37077 - DNA, 27 bp, Homo Sapiens
gatcgtatagtggttagtactctgcgt

SEQ ID NO: 37078 - DNA, 28 bp, Homo Sapiens
gatcgtatagtggttagtactctgcgtt

SEQ ID NO: 37079 - DNA, 20 bp, Homo Sapiens
gatgaaaacctttttccaag

SEQ ID NO: 37080 - DNA, 22 bp, Homo Sapiens
gatgaaaacctttttccaagga

SEQ ID NO: 37081 - DNA, 23 bp, Homo Sapiens
gatgaaaacctttttccaaggac

SEQ ID NO: 37082 - DNA, 24 bp, Homo Sapiens
gatgaaaacctttttccaaggaca

SEQ ID NO: 37083 - DNA, 25 bp, Homo Sapiens
gatgaaaacctttttccaaggacac

SEQ ID NO: 37084 - DNA, 26 bp, Homo Sapiens
gatgaaaacctttttccaaggacacc

SEQ ID NO: 37085 - DNA, 27 bp, Homo Sapiens
gatgaaaacctttttccaaggacacca

SEQ ID NO: 37086 - DNA, 39 bp, Homo Sapiens
gatgcgagaggtcccgggttcaaatcccggacgagcccc

SEQ ID NO: 37087 - DNA, 34 bp, Homo Sapiens; identical to SEQ ID NO: 16006

SEQ ID NO: 37088 - DNA, 35 bp, Homo Sapiens
gatggaggcgtgggttcgaatcccacttctgacac

SEQ ID NO: 37089 - DNA, 36 bp, Homo Sapiens; identical to SEQ ID NO: 16007

SEQ ID NO: 37090 - DNA, 27 bp, Homo Sapiens
gatggatcgaaaccatcctctgctacc

SEQ ID NO: 37091 - DNA, 21 bp, Homo Sapiens
gatggccgagcggtctaaggc

SEQ ID NO: 37092 - DNA, 25 bp, Homo Sapiens
gatggccgagcggtctaaggcgctg

SEQ ID NO: 37093 - DNA, 33 bp, Homo Sapiens
gatggcgtgggttcgaatcccaccgctgccacc

SEQ ID NO: 37094 - DNA, 27 bp, Homo Sapiens
gatggggtgtgataggtggcacggaga

SEQ ID NO: 37095 - DNA, 33 bp, Homo Sapiens; identical to SEQ ID NO: 16040

SEQ ID NO: 37096 - DNA, 26 bp, Homo Sapiens
gatgggttcgattctcatagtcctag

SEQ ID NO: 37097 - DNA, 32 bp, Homo Sapiens; identical to SEQ ID NO: 16055

SEQ ID NO: 37098 - DNA, 41 bp, Homo Sapiens; identical to SEQ ID NO: 16064

SEQ ID NO: 37099 - DNA, 45 bp, Homo Sapiens; identical to SEQ ID NO: 16068

SEQ ID NO: 37100 - DNA, 47 bp, Homo Sapiens; identical to SEQ ID NO: 16070

SEQ ID NO: 37101 - DNA, 19 bp, Homo Sapiens
gatgtagctcagtggtaga

SEQ ID NO: 37102 - DNA, 20 bp, Homo Sapiens
gatgtagctcagtggtagag

SEQ ID NO: 37103 - DNA, 32 bp, Homo Sapiens; identical to SEQ ID NO: 16090

SEQ ID NO: 37104 - DNA, 18 bp, Homo Sapiens
gattccagctcgaaggac

SEQ ID NO: 37105 - DNA, 20 bp, Homo Sapiens
gattccaggttcgactcctg

SEQ ID NO: 37106 - DNA, 29 bp, Homo Sapiens
gattccaggttcgactcctggctggctcg

SEQ ID NO: 37107 - DNA, 18 bp, Homo Sapiens
gattcccattcttgcgac

SEQ ID NO: 37108 - DNA, 22 bp, Homo Sapiens
gattcccattcttgcgacccgg

SEQ ID NO: 37109 - DNA, 24 bp, Homo Sapiens
gattcccattcttgcgacccgggt

SEQ ID NO: 37110 - DNA, 17 bp, Homo Sapiens
gattccccgacggggag

SEQ ID NO: 37111 - DNA, 18 bp, Homo Sapiens
gattccccgacggggagc

SEQ ID NO: 37112 - DNA, 19 bp, Homo Sapiens
gattccccgacggggagcc

SEQ ID NO: 37113 - DNA, 20 bp, Homo Sapiens
gattccccgacggggagcca

SEQ ID NO: 37114 - DNA, 18 bp, Homo Sapiens
gattcccggccaacgcac

SEQ ID NO: 37115 - DNA, 19 bp, Homo Sapiens
gattcccggccaacgcacc

SEQ ID NO: 37116 - DNA, 17 bp, Homo Sapiens
gattcccggccaatgca

SEQ ID NO: 37117 - DNA, 18 bp, Homo Sapiens
gattcccggccaatgcac

SEQ ID NO: 37118 - DNA, 19 bp, Homo Sapiens
gattcccggccaatgcacc

SEQ ID NO: 37119 - DNA, 18 bp, Homo Sapiens
gattcccgggcggcgcac

SEQ ID NO: 37120 - DNA, 19 bp, Homo Sapiens
gattcccgggcggcgcacc

SEQ ID NO: 37121 - DNA, 16 bp, Homo Sapiens
gattcccggtcaggga

SEQ ID NO: 37122 - DNA, 17 bp, Homo Sapiens
gattcccggtcagggaa

SEQ ID NO: 37123 - DNA, 18 bp, Homo Sapiens
gattcccggtcagggaac

SEQ ID NO: 37124 - DNA, 19 bp, Homo Sapiens
gattcccggtcagggaacc

SEQ ID NO: 37125 - DNA, 17 bp, Homo Sapiens
gattccggatcagaaga

SEQ ID NO: 37126 - DNA, 21 bp, Homo Sapiens
gattccggatcagaagattga

SEQ ID NO: 37127 - DNA, 18 bp, Homo Sapiens
gattccggctcgaaggac

SEQ ID NO: 37128 - DNA, 19 bp, Homo Sapiens
gattccggctcgaaggacc

SEQ ID NO: 37129 - DNA, 20 bp, Homo Sapiens
gattccggctcgaaggacca

SEQ ID NO: 37130 - DNA, 44 bp, Homo Sapiens
gattcctggttttcacccaggcggcccgggttcgactcccggtg

SEQ ID NO: 37131 - DNA, 17 bp, Homo Sapiens
gattcggcgctctcacc

SEQ ID NO: 37132 - DNA, 18 bp, Homo Sapiens
gattcggcgctctcaccg

SEQ ID NO: 37133 - DNA, 19 bp, Homo Sapiens
gattcggcgctctcaccgc

SEQ ID NO: 37134 - DNA, 20 bp, Homo Sapiens
gattcggcgctctcaccgcc

SEQ ID NO: 37135 - DNA, 27 bp, Homo Sapiens
gattcggcgctctcaccgccgcggccc

SEQ ID NO: 37136 - DNA, 28 bp, Homo Sapiens
gattcggcgctctcaccgccgcggcccg

SEQ ID NO: 37137 - DNA, 29 bp, Homo Sapiens
gattcggcgctctcaccgccgcggcccgg

SEQ ID NO: 37138 - DNA, 30 bp, Homo Sapiens; identical to SEQ ID NO: 16156

SEQ ID NO: 37139 - DNA, 29 bp, Homo Sapiens
gattctaggttcgactcctggctggctcg

SEQ ID NO: 37140 - DNA, 31 bp, Homo Sapiens; identical to SEQ ID NO: 16171

SEQ ID NO: 37141 - DNA, 19 bp, Homo Sapiens
gattctcgcttcgggtgcg

SEQ ID NO: 37142 - DNA, 17 bp, Homo Sapiens
gattctcgctttgggtg

SEQ ID NO: 37143 - DNA, 18 bp, Homo Sapiens
gattctcggtttgggtcc

SEQ ID NO: 37144 - DNA, 30 bp, Homo Sapiens
gattgagggttcgaatcccttcgtggttgc

SEQ ID NO: 37145 - DNA, 31 bp, Homo Sapiens; identical to SEQ ID NO: 16187

SEQ ID NO: 37146 - DNA, 17 bp, Homo Sapiens
gattgagggttcgagtc

SEQ ID NO: 37147 - DNA, 29 bp, Homo Sapiens
gattgagggttcgagtcccttcgtggtcg

SEQ ID NO: 37148 - DNA, 30 bp, Homo Sapiens; identical to SEQ ID NO: 16191

SEQ ID NO: 37149 - DNA, 31 bp, Homo Sapiens; identical to SEQ ID NO: 16192

SEQ ID NO: 37150 - DNA, 32 bp, Homo Sapiens; identical to SEQ ID NO: 16193

SEQ ID NO: 37151 - DNA, 20 bp, Homo Sapiens
gattgcaggttcgagtcctg

SEQ ID NO: 37152 - DNA, 30 bp, Homo Sapiens; identical to SEQ ID NO: 16195

SEQ ID NO: 37153 - DNA, 31 bp, Homo Sapiens; identical to SEQ ID NO: 16196

SEQ ID NO: 37154 - DNA, 32 bp, Homo Sapiens; identical to SEQ ID NO: 16197

SEQ ID NO: 37155 - DNA, 16 bp, Homo Sapiens
gattgtgaatctgaca

SEQ ID NO: 37156 - DNA, 18 bp, Homo Sapiens
gattgtgaatctgacaac

SEQ ID NO: 37157 - DNA, 19 bp, Homo Sapiens
gattgtgaatctgacaaca

SEQ ID NO: 37158 - DNA, 21 bp, Homo Sapiens
gattgtgaatctgacaacaga

SEQ ID NO: 37159 - DNA, 25 bp, Homo Sapiens
gattgtgaatctgacaacagaggct

SEQ ID NO: 37160 - DNA, 33 bp, Homo Sapiens; identical to SEQ ID NO: 16215

SEQ ID NO: 37161 - DNA, 34 bp, Homo Sapiens; identical to SEQ ID NO: 16216

SEQ ID NO: 37162 - DNA, 35 bp, Homo Sapiens; identical to SEQ ID NO: 16217

SEQ ID NO: 37163 - DNA, 38 bp, Homo Sapiens; identical to SEQ ID NO: 16220

SEQ ID NO: 37164 - DNA, 39 bp, Homo Sapiens; identical to SEQ ID NO: 16221

SEQ ID NO: 37165 - DNA, 42 bp, Homo Sapiens; identical to SEQ ID NO: 16224

SEQ ID NO: 37166 - DNA, 43 bp, Homo Sapiens; identical to SEQ ID NO: 16225

SEQ ID NO: 37167 - DNA, 44 bp, Homo Sapiens; identical to SEQ ID NO: 16226

SEQ ID NO: 37168 - DNA, 45 bp, Homo Sapiens; identical to SEQ ID NO: 16227

SEQ ID NO: 37169 - DNA, 46 bp, Homo Sapiens; identical to SEQ ID NO: 16228

SEQ ID NO: 37170 - DNA, 29 bp, Homo Sapiens
gattgtgggttcgagtcccatctggggtg

SEQ ID NO: 37171 - DNA, 30 bp, Homo Sapiens; identical to SEQ ID NO: 16232

SEQ ID NO: 37172 - DNA, 31 bp, Homo Sapiens; identical to SEQ ID NO: 16233

SEQ ID NO: 37173 - DNA, 30 bp, Homo Sapiens; identical to SEQ ID NO: 16237

SEQ ID NO: 37174 - DNA, 31 bp, Homo Sapiens; identical to SEQ ID NO: 16238

SEQ ID NO: 37175 - DNA, 19 bp, Homo Sapiens
gatttcaacttaacttgac

SEQ ID NO: 37176 - DNA, 20 bp, Homo Sapiens
gatttcaacttaacttgacc

SEQ ID NO: 37177 - DNA, 24 bp, Homo Sapiens
gatttcaacttaacttgaccgctc

SEQ ID NO: 37178 - DNA, 26 bp, Homo Sapiens
gatttcaacttaacttgaccgctctg

SEQ ID NO: 37179 - DNA, 27 bp, Homo Sapiens
gatttcaacttaacttgaccgctctga

SEQ ID NO: 37180 - DNA, 28 bp, Homo Sapiens
gatttcaacttaacttgaccgctctgac

SEQ ID NO: 37181 - DNA, 29 bp, Homo Sapiens
gatttcaacttaacttgaccgctctgacc

SEQ ID NO: 37182 - DNA, 30 bp, Homo Sapiens; identical to SEQ ID NO: 16253

SEQ ID NO: 37183 - DNA, 29 bp, Homo Sapiens
gcaaattcgaagaagcagcttcaaacctg

SEQ ID NO: 37184 - DNA, 36 bp, Homo Sapiens; identical to SEQ ID NO: 16289

SEQ ID NO: 37185 - DNA, 37 bp, Homo Sapiens; identical to SEQ ID NO: 16290

SEQ ID NO: 37186 - DNA, 38 bp, Homo Sapiens; identical to SEQ ID NO: 16291

SEQ ID NO: 37187 - DNA, 29 bp, Homo Sapiens
gcaacctcggttcgaatccgagtcacggc

SEQ ID NO: 37188 - DNA, 31 bp, Homo Sapiens; identical to SEQ ID NO: 16297

SEQ ID NO: 37189 - DNA, 32 bp, Homo Sapiens; identical to SEQ ID NO: 16298

SEQ ID NO: 37190 - DNA, 29 bp, Homo Sapiens
gcaatacactgaaaatgtttagacgggct

SEQ ID NO: 37191 - DNA, 30 bp, Homo Sapiens; identical to SEQ ID NO: 16311

SEQ ID NO: 37192 - DNA, 31 bp, Homo Sapiens; identical to SEQ ID NO: 16312

SEQ ID NO: 37193 - DNA, 32 bp, Homo Sapiens; identical to SEQ ID NO: 16313

SEQ ID NO: 37194 - DNA, 19 bp, Homo Sapiens
gcaatggacgagcgcgctg

SEQ ID NO: 37195 - DNA, 22 bp, Homo Sapiens
gcaatggataacgcgtctgact

SEQ ID NO: 37196 - DNA, 16 bp, Homo Sapiens
gcaatggatagcgcat

SEQ ID NO: 37197 - DNA, 18 bp, Homo Sapiens
gcaatggatagcgcattg

SEQ ID NO: 37198 - DNA, 19 bp, Homo Sapiens
gcaatggatagcgcattgg

SEQ ID NO: 37199 - DNA, 20 bp, Homo Sapiens
gcaatggatagcgcattgga

SEQ ID NO: 37200 - DNA, 21 bp, Homo Sapiens
gcaatggatagcgcattggac

SEQ ID NO: 37201 - DNA, 24 bp, Homo Sapiens
gcaatggatagcgcattggacttc

SEQ ID NO: 37202 - DNA, 44 bp, Homo Sapiens
gcaatggatagcgcattggacttctaattcaaaggttccgggtt

SEQ ID NO: 37203 - DNA, 21 bp, Homo Sapiens
gcaatggtagcgcgtctgact

SEQ ID NO: 37204 - DNA, 18 bp, Homo Sapiens
gcaatggtggttcagtgg

SEQ ID NO: 37205 - DNA, 29 bp, Homo Sapiens
gcaatggtggttcagtggtagaattctcg

SEQ ID NO: 37206 - DNA, 30 bp, Homo Sapiens; identical to SEQ ID NO: 16339

SEQ ID NO: 37207 - DNA, 31 bp, Homo Sapiens; identical to SEQ ID NO: 16340

SEQ ID NO: 37208 - DNA, 32 bp, Homo Sapiens; identical to SEQ ID NO: 16341

SEQ ID NO: 37209 - DNA, 33 bp, Homo Sapiens
gcaatggtggttcagtggtagaattctcgcctt

SEQ ID NO: 37210 - DNA, 32 bp, Homo Sapiens
gcacacgtgggttcgaatcccatcctcgtcgc

SEQ ID NO: 37211 - DNA, 33 bp, Homo Sapiens
gcacacgtgggttcgaatcccatcctcgtcgcc

SEQ ID NO: 37212 - DNA, 27 bp, Homo Sapiens
gcacaggttcgaatcctgttcgtgacg

SEQ ID NO: 37213 - DNA, 31 bp, Homo Sapiens; identical to SEQ ID NO: 16353

SEQ ID NO: 37214 - DNA, 34 bp, Homo Sapiens
gcacgaggccccgggttcaatccccggcacctcc

SEQ ID NO: 37215 - DNA, 35 bp, Homo Sapiens
gcacgaggccccgggttcaatccccggcacctcca

SEQ ID NO: 37216 - DNA, 36 bp, Homo Sapiens; identical to SEQ ID NO: 16356

SEQ ID NO: 37217 - DNA, 37 bp, Homo Sapiens; identical to SEQ ID NO: 16357

SEQ ID NO: 37218 - DNA, 38 bp, Homo Sapiens; identical to SEQ ID NO: 16358

SEQ ID NO: 37219 - DNA, 32 bp, Homo Sapiens; identical to SEQ ID NO: 16360

SEQ ID NO: 37220 - DNA, 33 bp, Homo Sapiens; identical to SEQ ID NO: 16361

SEQ ID NO: 37221 - DNA, 41 bp, Homo Sapiens
gcacgtatgaggccccgggttcaatccccggcatctccacc

SEQ ID NO: 37222 - DNA, 16 bp, Homo Sapiens
gcactctggactctga

SEQ ID NO: 37223 - DNA, 17 bp, Homo Sapiens
gcactctggactctgaa

SEQ ID NO: 37224 - DNA, 18 bp, Homo Sapiens
gcactctggactctgaat

SEQ ID NO: 37225 - DNA, 19 bp, Homo Sapiens
gcactctggactctgaatc

SEQ ID NO: 37226 - DNA, 20 bp, Homo Sapiens
gcactctggactctgaatcc

SEQ ID NO: 37227 - DNA, 21 bp, Homo Sapiens
gcactctggactctgaatcca

SEQ ID NO: 37228 - DNA, 22 bp, Homo Sapiens
gcactctggactctgaatccag

SEQ ID NO: 37229 - DNA, 23 bp, Homo Sapiens
gcactctggactctgaatccagc

SEQ ID NO: 37230 - DNA, 24 bp, Homo Sapiens
gcactctggactctgaatccagcg

SEQ ID NO: 37231 - DNA, 28 bp, Homo Sapiens
gcactctggactctgaatccagcgatcc

SEQ ID NO: 37232 - DNA, 29 bp, Homo Sapiens
gcactctggactctgaatccagcgatccg

SEQ ID NO: 37233 - DNA, 30 bp, Homo Sapiens; identical to SEQ ID NO: 16375

SEQ ID NO: 37234 - DNA, 31 bp, Homo Sapiens; identical to SEQ ID NO: 16376

SEQ ID NO: 37235 - DNA, 32 bp, Homo Sapiens; identical to SEQ ID NO: 16377

SEQ ID NO: 37236 - DNA, 33 bp, Homo Sapiens; identical to SEQ ID NO: 16378

SEQ ID NO: 37237 - DNA, 34 bp, Homo Sapiens; identical to SEQ ID NO: 16379

SEQ ID NO: 37238 - DNA, 35 bp, Homo Sapiens; identical to SEQ ID NO: 16380

SEQ ID NO: 37239 - DNA, 40 bp, Homo Sapiens
gcactctggactctgaatccagcgatccgagttcaaatct

SEQ ID NO: 37240 - DNA, 43 bp, Homo Sapiens
gcactctggactctgaatccagcgatccgagttcaaatctcgg

SEQ ID NO: 37241 - DNA, 16 bp, Homo Sapiens
gcactctggactttga

SEQ ID NO: 37242 - DNA, 17 bp, Homo Sapiens
gcactctggactttgaa

SEQ ID NO: 37243 - DNA, 18 bp, Homo Sapiens
gcactctggactttgaat

SEQ ID NO: 37244 - DNA, 19 bp, Homo Sapiens
gcactctggactttgaatc

SEQ ID NO: 37245 - DNA, 20 bp, Homo Sapiens
gcactctggactttgaatcc

SEQ ID NO: 37246 - DNA, 31 bp, Homo Sapiens; identical to SEQ ID NO: 16395

SEQ ID NO: 37247 - DNA, 34 bp, Homo Sapiens
gcactctggactttgaatccagcgatccgagttc

SEQ ID NO: 37248 - DNA, 17 bp, Homo Sapiens
gcactggtggttcagtg

SEQ ID NO: 37249 - DNA, 18 bp, Homo Sapiens
gcactggtggttcagtgg

SEQ ID NO: 37250 - DNA, 29 bp, Homo Sapiens
gcactggtggttcagtggtagaattctcg

SEQ ID NO: 37251 - DNA, 30 bp, Homo Sapiens; identical to SEQ ID NO: 16401

SEQ ID NO: 37252 - DNA, 31 bp, Homo Sapiens; identical to SEQ ID NO: 16402

SEQ ID NO: 37253 - DNA, 32 bp, Homo Sapiens; identical to SEQ ID NO: 16403

SEQ ID NO: 37254 - DNA, 33 bp, Homo Sapiens; identical to SEQ ID NO: 16404

SEQ ID NO: 37255 - DNA, 27 bp, Homo Sapiens
gcagaaggtcctgggttcgagccccag

SEQ ID NO: 37256 - DNA, 34 bp, Homo Sapiens; identical to SEQ ID NO: 16415

SEQ ID NO: 37257 - DNA, 35 bp, Homo Sapiens; identical to SEQ ID NO: 16416

SEQ ID NO: 37258 - DNA, 36 bp, Homo Sapiens; identical to SEQ ID NO: 16417

SEQ ID NO: 37259 - DNA, 37 bp, Homo Sapiens; identical to SEQ ID NO: 16418

SEQ ID NO: 37260 - DNA, 38 bp, Homo Sapiens; identical to SEQ ID NO: 16419

SEQ ID NO: 37261 - DNA, 16 bp, Homo Sapiens
gcagagcatttgactg

SEQ ID NO: 37262 - DNA, 18 bp, Homo Sapiens
gcagagtggcgcagcgga

SEQ ID NO: 37263 - DNA, 20 bp, Homo Sapiens
gcagagtggcgcagcggaag

SEQ ID NO: 37264 - DNA, 30 bp, Homo Sapiens; identical to SEQ ID NO: 16440

SEQ ID NO: 37265 - DNA, 32 bp, Homo Sapiens; identical to SEQ ID NO: 16442

SEQ ID NO: 37266 - DNA, 16 bp, Homo Sapiens
gcagcaacctcggttc

SEQ ID NO: 37267 - DNA, 17 bp, Homo Sapiens
gcagcaacctcggttcg

SEQ ID NO: 37268 - DNA, 31 bp, Homo Sapiens; identical to SEQ ID NO: 16460

SEQ ID NO: 37269 - DNA, 32 bp, Homo Sapiens; identical to SEQ ID NO: 16461

SEQ ID NO: 37270 - DNA, 33 bp, Homo Sapiens; identical to SEQ ID NO: 16462

SEQ ID NO: 37271 - DNA, 34 bp, Homo Sapiens; identical to SEQ ID NO: 16463

SEQ ID NO: 37272 - DNA, 35 bp, Homo Sapiens; identical to SEQ ID NO: 16464

SEQ ID NO: 37273 - DNA, 36 bp, Homo Sapiens; identical to SEQ ID NO: 16465

SEQ ID NO: 37274 - DNA, 16 bp, Homo Sapiens
gcagcgatggccgagt

SEQ ID NO: 37275 - DNA, 17 bp, Homo Sapiens
gcagcgatggccgagtg

SEQ ID NO: 37276 - DNA, 18 bp, Homo Sapiens
gcagcgatggccgagtgg

SEQ ID NO: 37277 - DNA, 19 bp, Homo Sapiens
gcagcgatggccgagtggt

SEQ ID NO: 37278 - DNA, 20 bp, Homo Sapiens
gcagcgatggccgagtggtt

SEQ ID NO: 37279 - DNA, 22 bp, Homo Sapiens
gcagcgatggccgagtggttaa

SEQ ID NO: 37280 - DNA, 23 bp, Homo Sapiens
gcagcgatggccgagtggttaag

SEQ ID NO: 37281 - DNA, 24 bp, Homo Sapiens
gcagcgatggccgagtggttaagg

SEQ ID NO: 37282 - DNA, 25 bp, Homo Sapiens
gcagcgatggccgagtggttaaggc

SEQ ID NO: 37283 - DNA, 33 bp, Homo Sapiens; identical to SEQ ID NO: 16477

SEQ ID NO: 37284 - DNA, 20 bp, Homo Sapiens
gcagcggaagcgtgctgggc

SEQ ID NO: 37285 - DNA, 21 bp, Homo Sapiens
gcagcggaagcgtgctgggcc

SEQ ID NO: 37286 - DNA, 22 bp, Homo Sapiens
gcagcggaagcgtgctgggccc

SEQ ID NO: 37287 - DNA, 22 bp, Homo Sapiens
gcagcttcaaacctgccggggc

SEQ ID NO: 37288 - DNA, 23 bp, Homo Sapiens
gcagcttcaaacctgccggggct

SEQ ID NO: 37289 - DNA, 24 bp, Homo Sapiens
gcagcttcaaacctgccggggctt

SEQ ID NO: 37290 - DNA, 26 bp, Homo Sapiens
gcagcttcaaacctgccggggcttcc

SEQ ID NO: 37291 - DNA, 16 bp, Homo Sapiens
gcaggttcgaatcctg

SEQ ID NO: 37292 - DNA, 27 bp, Homo Sapiens
gcaggttcgaatcctgccgactacgcc

SEQ ID NO: 37293 - DNA, 16 bp, Homo Sapiens
gcaggttcgagtcctg

SEQ ID NO: 37294 - DNA, 26 bp, Homo Sapiens
gcaggttcgagtcctgccgcggtcgc

SEQ ID NO: 37295 - DNA, 27 bp, Homo Sapiens
gcaggttcgagtcctgccgcggtcgcc

SEQ ID NO: 37296 - DNA, 19 bp, Homo Sapiens
gcagtggtagaattctcgc

SEQ ID NO: 37297 - DNA, 21 bp, Homo Sapiens
gcagtggtagaattctcgcct

SEQ ID NO: 37298 - DNA, 18 bp, Homo Sapiens
gcagttgacccgggttcg

SEQ ID NO: 37299 - DNA, 36 bp, Homo Sapiens; identical to SEQ ID NO: 16504

SEQ ID NO: 37300 - DNA, 30 bp, Homo Sapiens
gcatagctgccttccaagcagttgacccgg

SEQ ID NO: 37301 - DNA, 18 bp, Homo Sapiens
gcataggtggttcagtgg

SEQ ID NO: 37302 - DNA, 19 bp, Homo Sapiens
gcatcagcctccggagctg

SEQ ID NO: 37303 - DNA, 27 bp, Homo Sapiens
gcatcagcctccggagctggggattgt

SEQ ID NO: 37304 - DNA, 17 bp, Homo Sapiens
gcatgagactcttaatc

SEQ ID NO: 37305 - DNA, 18 bp, Homo Sapiens
gcatgagactcttaatct

SEQ ID NO: 37306 - DNA, 33 bp, Homo Sapiens; identical to SEQ ID NO: 16530

SEQ ID NO: 37307 - DNA, 35 bp, Homo Sapiens; identical to SEQ ID NO: 16532

SEQ ID NO: 37308 - DNA, 36 bp, Homo Sapiens; identical to SEQ ID NO: 16533

SEQ ID NO: 37309 - DNA, 37 bp, Homo Sapiens; identical to SEQ ID NO: 16534

SEQ ID NO: 37310 - DNA, 16 bp, Homo Sapiens
gcatgggactcttaat

SEQ ID NO: 37311 - DNA, 17 bp, Homo Sapiens
gcatgggactcttaatc

SEQ ID NO: 37312 - DNA, 18 bp, Homo Sapiens
gcatgggactcttaatcc

SEQ ID NO: 37313 - DNA, 19 bp, Homo Sapiens
gcatgggactcttaatccc

SEQ ID NO: 37314 - DNA, 18 bp, Homo Sapiens
gcatgggtgattcagtgg

SEQ ID NO: 37315 - DNA, 16 bp, Homo Sapiens
gcatgggtggttcagt

SEQ ID NO: 37316 - DNA, 17 bp, Homo Sapiens
gcatgggtggttcagtg

SEQ ID NO: 37317 - DNA, 18 bp, Homo Sapiens
gcatgggtggttcagtgg

SEQ ID NO: 37318 - DNA, 19 bp, Homo Sapiens
gcatgggtggttcagtggt

SEQ ID NO: 37319 - DNA, 20 bp, Homo Sapiens
gcatgggtggttcagtggta

SEQ ID NO: 37320 - DNA, 21 bp, Homo Sapiens
gcatgggtggttcagtggtag

SEQ ID NO: 37321 - DNA, 22 bp, Homo Sapiens
gcatgggtggttcagtggtaga

SEQ ID NO: 37322 - DNA, 23 bp, Homo Sapiens
gcatgggtggttcagtggtagaa

SEQ ID NO: 37323 - DNA, 24 bp, Homo Sapiens
gcatgggtggttcagtggtagaat

SEQ ID NO: 37324 - DNA, 25 bp, Homo Sapiens
gcatgggtggttcagtggtagaatt

SEQ ID NO: 37325 - DNA, 26 bp, Homo Sapiens
gcatgggtggttcagtggtagaattc

SEQ ID NO: 37326 - DNA, 27 bp, Homo Sapiens
gcatgggtggttcagtggtagaattct

SEQ ID NO: 37327 - DNA, 28 bp, Homo Sapiens
gcatgggtggttcagtggtagaattctc

SEQ ID NO: 37328 - DNA, 29 bp, Homo Sapiens
gcatgggtggttcagtggtagaattctcg

SEQ ID NO: 37329 - DNA, 30 bp, Homo Sapiens; identical to SEQ ID NO: 16559

SEQ ID NO: 37330 - DNA, 31 bp, Homo Sapiens; identical to SEQ ID NO: 16560

SEQ ID NO: 37331 - DNA, 32 bp, Homo Sapiens; identical to SEQ ID NO: 16561

SEQ ID NO: 37332 - DNA, 33 bp, Homo Sapiens; identical to SEQ ID NO: 16562

SEQ ID NO: 37333 - DNA, 34 bp, Homo Sapiens; identical to SEQ ID NO: 16563

SEQ ID NO: 37334 - DNA, 35 bp, Homo Sapiens; identical to SEQ ID NO: 16564

SEQ ID NO: 37335 - DNA, 36 bp, Homo Sapiens; identical to SEQ ID NO: 16565

SEQ ID NO: 37336 - DNA, 38 bp, Homo Sapiens; identical to SEQ ID NO: 16567

SEQ ID NO: 37337 - DNA, 40 bp, Homo Sapiens; identical to SEQ ID NO: 16569

SEQ ID NO: 37338 - DNA, 43 bp, Homo Sapiens; identical to SEQ ID NO: 16572

SEQ ID NO: 37339 - DNA, 44 bp, Homo Sapiens; identical to SEQ ID NO: 16573

SEQ ID NO: 37340 - DNA, 16 bp, Homo Sapiens
gcattcggctgttaac

SEQ ID NO: 37341 - DNA, 17 bp, Homo Sapiens
gcattcggctgttaacc

SEQ ID NO: 37342 - DNA, 18 bp, Homo Sapiens
gcattggtggttcaatgg

SEQ ID NO: 37343 - DNA, 30 bp, Homo Sapiens; identical to SEQ ID NO: 16612

SEQ ID NO: 37344 - DNA, 31 bp, Homo Sapiens; identical to SEQ ID NO: 16613

SEQ ID NO: 37345 - DNA, 32 bp, Homo Sapiens; identical to SEQ ID NO: 16614

SEQ ID NO: 37346 - DNA, 16 bp, Homo Sapiens
gcattggtggttcagt

SEQ ID NO: 37347 - DNA, 17 bp, Homo Sapiens
gcattggtggttcagtg

SEQ ID NO: 37348 - DNA, 18 bp, Homo Sapiens
gcattggtggttcagtgg

SEQ ID NO: 37349 - DNA, 19 bp, Homo Sapiens
gcattggtggttcagtggt

SEQ ID NO: 37350 - DNA, 20 bp, Homo Sapiens
gcattggtggttcagtggta

SEQ ID NO: 37351 - DNA, 21 bp, Homo Sapiens
gcattggtggttcagtggtag

SEQ ID NO: 37352 - DNA, 22 bp, Homo Sapiens
gcattggtggttcagtggtaga

SEQ ID NO: 37353 - DNA, 23 bp, Homo Sapiens
gcattggtggttcagtggtagaa

SEQ ID NO: 37354 - DNA, 24 bp, Homo Sapiens
gcattggtggttcagtggtagaat

SEQ ID NO: 37355 - DNA, 25 bp, Homo Sapiens
gcattggtggttcagtggtagaatt

SEQ ID NO: 37356 - DNA, 26 bp, Homo Sapiens
gcattggtggttcagtggtagaattc

SEQ ID NO: 37357 - DNA, 27 bp, Homo Sapiens
gcattggtggttcagtggtagaattct

SEQ ID NO: 37358 - DNA, 28 bp, Homo Sapiens
gcattggtggttcagtggtagaattctc

SEQ ID NO: 37359 - DNA, 29 bp, Homo Sapiens
gcattggtggttcagtggtagaattctcg

SEQ ID NO: 37360 - DNA, 30 bp, Homo Sapiens; identical to SEQ ID NO: 16630

SEQ ID NO: 37361 - DNA, 31 bp, Homo Sapiens; identical to SEQ ID NO: 16631

SEQ ID NO: 37362 - DNA, 32 bp, Homo Sapiens; identical to SEQ ID NO: 16632

SEQ ID NO: 37363 - DNA, 33 bp, Homo Sapiens; identical to SEQ ID NO: 16633

SEQ ID NO: 37364 - DNA, 34 bp, Homo Sapiens; identical to SEQ ID NO: 16634

SEQ ID NO: 37365 - DNA, 35 bp, Homo Sapiens; identical to SEQ ID NO: 16635

SEQ ID NO: 37366 - DNA, 36 bp, Homo Sapiens; identical to SEQ ID NO: 16636

SEQ ID NO: 37367 - DNA, 38 bp, Homo Sapiens; identical to SEQ ID NO: 16638

SEQ ID NO: 37368 - DNA, 33 bp, Homo Sapiens; identical to SEQ ID NO: 16640

SEQ ID NO: 37369 - DNA, 34 bp, Homo Sapiens; identical to SEQ ID NO: 16641

SEQ ID NO: 37370 - DNA, 35 bp, Homo Sapiens; identical to SEQ ID NO: 16642

SEQ ID NO: 37371 - DNA, 36 bp, Homo Sapiens; identical to SEQ ID NO: 16643

SEQ ID NO: 37372 - DNA, 37 bp, Homo Sapiens; identical to SEQ ID NO: 16644

SEQ ID NO: 37373 - DNA, 38 bp, Homo Sapiens; identical to SEQ ID NO: 16645

SEQ ID NO: 37374 - DNA, 39 bp, Homo Sapiens; identical to SEQ ID NO: 16646

SEQ ID NO: 37375 - DNA, 40 bp, Homo Sapiens; identical to SEQ ID NO: 16647

SEQ ID NO: 37376 - DNA, 41 bp, Homo Sapiens; identical to SEQ ID NO: 16648

SEQ ID NO: 37377 - DNA, 42 bp, Homo Sapiens; identical to SEQ ID NO: 16649

SEQ ID NO: 37378 - DNA, 43 bp, Homo Sapiens; identical to SEQ ID NO: 16650

SEQ ID NO: 37379 - DNA, 44 bp, Homo Sapiens; identical to SEQ ID NO: 16651

SEQ ID NO: 37380 - DNA, 45 bp, Homo Sapiens; identical to SEQ ID NO: 16652

SEQ ID NO: 37381 - DNA, 46 bp, Homo Sapiens; identical to SEQ ID NO: 16653

SEQ ID NO: 37382 - DNA, 47 bp, Homo Sapiens; identical to SEQ ID NO: 16654

SEQ ID NO: 37383 - DNA, 16 bp, Homo Sapiens
gccaaggtcgcgggtt

SEQ ID NO: 37384 - DNA, 17 bp, Homo Sapiens
gccaaggtcgcgggttc

SEQ ID NO: 37385 - DNA, 36 bp, Homo Sapiens; identical to SEQ ID NO: 16663

SEQ ID NO: 37386 - DNA, 31 bp, Homo Sapiens
gccaaggtcgcgggttcgatccccgtacggg

SEQ ID NO: 37387 - DNA, 35 bp, Homo Sapiens; identical to SEQ ID NO: 16665

SEQ ID NO: 37388 - DNA, 36 bp, Homo Sapiens; identical to SEQ ID NO: 16666

SEQ ID NO: 37389 - DNA, 16 bp, Homo Sapiens
gccacgcgggaggccc

SEQ ID NO: 37390 - DNA, 17 bp, Homo Sapiens
gccacgcgggaggcccg

SEQ ID NO: 37391 - DNA, 19 bp, Homo Sapiens
gccacgcgggaggcccggg

SEQ ID NO: 37392 - DNA, 20 bp, Homo Sapiens
gccacgcgggaggcccgggt

SEQ ID NO: 37393 - DNA, 33 bp, Homo Sapiens
gccacggcccgggttcgattcccggtcagggaa

SEQ ID NO: 37394 - DNA, 18 bp, Homo Sapiens
gccagggattgtgggttc

SEQ ID NO: 37395 - DNA, 35 bp, Homo Sapiens; identical to SEQ ID NO: 16687

SEQ ID NO: 37396 - DNA, 37 bp, Homo Sapiens; identical to SEQ ID NO: 16693

SEQ ID NO: 37397 - DNA, 35 bp, Homo Sapiens; identical to SEQ ID NO: 16699

SEQ ID NO: 37398 - DNA, 36 bp, Homo Sapiens; identical to SEQ ID NO: 16700

SEQ ID NO: 37399 - DNA, 37 bp, Homo Sapiens; identical to SEQ ID NO: 16701

SEQ ID NO: 37400 - DNA, 38 bp, Homo Sapiens; identical to SEQ ID NO: 16702

SEQ ID NO: 37401 - DNA, 31 bp, Homo Sapiens; identical to SEQ ID NO: 16710

SEQ ID NO: 37402 - DNA, 16 bp, Homo Sapiens
gcccacccagggacgc

SEQ ID NO: 37403 - DNA, 17 bp, Homo Sapiens
gcccacccagggacgcc

SEQ ID NO: 37404 - DNA, 18 bp, Homo Sapiens
gcccacccagggacgcca

SEQ ID NO: 37405 - DNA, 32 bp, Homo Sapiens; identical to SEQ ID NO: 16715

SEQ ID NO: 37406 - DNA, 33 bp, Homo Sapiens; identical to SEQ ID NO: 16716

SEQ ID NO: 37407 - DNA, 34 bp, Homo Sapiens; identical to SEQ ID NO: 16717

SEQ ID NO: 37408 - DNA, 25 bp, Homo Sapiens
gcccataacccagaggtcgatggat

SEQ ID NO: 37409 - DNA, 16 bp, Homo Sapiens
gccccacgttgggcgc

SEQ ID NO: 37410 - DNA, 17 bp, Homo Sapiens
gccccacgttgggcgcc

SEQ ID NO: 37411 - DNA, 18 bp, Homo Sapiens
gccccacgttgggcgcca

SEQ ID NO: 37412 - DNA, 16 bp, Homo Sapiens
gccccagtggaaccac

SEQ ID NO: 37413 - DNA, 17 bp, Homo Sapiens
gccccagtggaaccacc

SEQ ID NO: 37414 - DNA, 18 bp, Homo Sapiens
gccccagtggaaccacca

SEQ ID NO: 37415 - DNA, 18 bp, Homo Sapiens
gccccagtggcctaatgg

SEQ ID NO: 37416 - DNA, 19 bp, Homo Sapiens
gccccagtggcctaatgga

SEQ ID NO: 37417 - DNA, 20 bp, Homo Sapiens
gccccagtggcctaatggat

SEQ ID NO: 37418 - DNA, 25 bp, Homo Sapiens
gccccagtggcctaatggataaggc

SEQ ID NO: 37419 - DNA, 27 bp, Homo Sapiens
gccccagtggcctaatggataaggcac

SEQ ID NO: 37420 - DNA, 33 bp, Homo Sapiens
gccccagtggcctaatggataaggcactggcct

SEQ ID NO: 37421 - DNA, 33 bp, Homo Sapiens; identical to SEQ ID NO: 16746

SEQ ID NO: 37422 - DNA, 36 bp, Homo Sapiens; identical to SEQ ID NO: 16747

SEQ ID NO: 37423 - DNA, 19 bp, Homo Sapiens
gcccccatgtctaacaaca

SEQ ID NO: 37424 - DNA, 23 bp, Homo Sapiens
gcccccatgtctaacaacatggc

SEQ ID NO: 37425 - DNA, 24 bp, Homo Sapiens
gcccccatgtctaacaacatggct

SEQ ID NO: 37426 - DNA, 25 bp, Homo Sapiens
gcccccatgtctaacaacatggctt

SEQ ID NO: 37427 - DNA, 27 bp, Homo Sapiens
gcccccatgtctaacaacatggctttc

SEQ ID NO: 37428 - DNA, 28 bp, Homo Sapiens
gcccccatgtctaacaacatggctttct

SEQ ID NO: 37429 - DNA, 29 bp, Homo Sapiens
gcccccatgtctaacaacatggctttctc

SEQ ID NO: 37430 - DNA, 30 bp, Homo Sapiens; identical to SEQ ID NO: 16767

SEQ ID NO: 37431 - DNA, 32 bp, Homo Sapiens; identical to SEQ ID NO: 16769

SEQ ID NO: 37432 - DNA, 33 bp, Homo Sapiens; identical to SEQ ID NO: 16770

SEQ ID NO: 37433 - DNA, 30 bp, Homo Sapiens; identical to SEQ ID NO: 16772

SEQ ID NO: 37434 - DNA, 30 bp, Homo Sapiens
gccccgggttcgatccccggcatctccacc

SEQ ID NO: 37435 - DNA, 19 bp, Homo Sapiens
gccccggtggcctaatgga

SEQ ID NO: 37436 - DNA, 16 bp, Homo Sapiens
gcccgcatcctccacc

SEQ ID NO: 37437 - DNA, 17 bp, Homo Sapiens
gcccgcatcctccacca

SEQ ID NO: 37438 - DNA, 16 bp, Homo Sapiens
gcccgcattctccacc

SEQ ID NO: 37439 - DNA, 16 bp, Homo Sapiens
gcccggatagctcagt

SEQ ID NO: 37440 - DNA, 17 bp, Homo Sapiens
gcccggatagctcagtc

SEQ ID NO: 37441 - DNA, 18 bp, Homo Sapiens
gcccggatagctcagtcg

SEQ ID NO: 37442 - DNA, 19 bp, Homo Sapiens
gcccggatagctcagtcgg

SEQ ID NO: 37443 - DNA, 20 bp, Homo Sapiens
gcccggatagctcagtcggt

SEQ ID NO: 37444 - DNA, 22 bp, Homo Sapiens
gcccggatagctcagtcggtag

SEQ ID NO: 37445 - DNA, 23 bp, Homo Sapiens
gcccggatagctcagtcggtaga

SEQ ID NO: 37446 - DNA, 24 bp, Homo Sapiens
gcccggatagctcagtcggtagag

SEQ ID NO: 37447 - DNA, 25 bp, Homo Sapiens
gcccggatagctcagtcggtagagc

SEQ ID NO: 37448 - DNA, 26 bp, Homo Sapiens
gcccggatagctcagtcggtagagca

SEQ ID NO: 37449 - DNA, 27 bp, Homo Sapiens
gcccggatagctcagtcggtagagcat

SEQ ID NO: 37450 - DNA, 28 bp, Homo Sapiens
gcccggatagctcagtcggtagagcatc

SEQ ID NO: 37451 - DNA, 29 bp, Homo Sapiens
gcccggatagctcagtcggtagagcatca

SEQ ID NO: 37452 - DNA, 30 bp, Homo Sapiens; identical to SEQ ID NO: 16802

SEQ ID NO: 37453 - DNA, 31 bp, Homo Sapiens; identical to SEQ ID NO: 16803

SEQ ID NO: 37454 - DNA, 32 bp, Homo Sapiens; identical to SEQ ID NO: 16804

SEQ ID NO: 37455 - DNA, 33 bp, Homo Sapiens; identical to SEQ ID NO: 16805

SEQ ID NO: 37456 - DNA, 34 bp, Homo Sapiens; identical to SEQ ID NO: 16806

SEQ ID NO: 37457 - DNA, 35 bp, Homo Sapiens; identical to SEQ ID NO: 16807

SEQ ID NO: 37458 - DNA, 36 bp, Homo Sapiens; identical to SEQ ID NO: 16808

SEQ ID NO: 37459 - DNA, 16 bp, Homo Sapiens
gcccggctagctcagt

SEQ ID NO: 37460 - DNA, 17 bp, Homo Sapiens
gcccggctagctcagtc

SEQ ID NO: 37461 - DNA, 18 bp, Homo Sapiens
gcccggctagctcagtcg

SEQ ID NO: 37462 - DNA, 32 bp, Homo Sapiens; identical to SEQ ID NO: 16814

SEQ ID NO: 37463 - DNA, 33 bp, Homo Sapiens; identical to SEQ ID NO: 16815

SEQ ID NO: 37464 - DNA, 19 bp, Homo Sapiens
gcccggctagctcagtcgg

SEQ ID NO: 37465 - DNA, 23 bp, Homo Sapiens
gcccggctagctcagtcggtaga

SEQ ID NO: 37466 - DNA, 25 bp, Homo Sapiens
gcccggctagctcagtcggtagagc

SEQ ID NO: 37467 - DNA, 26 bp, Homo Sapiens
gcccggctagctcagtcggtagagca

SEQ ID NO: 37468 - DNA, 27 bp, Homo Sapiens
gcccggctagctcagtcggtagagcat

SEQ ID NO: 37469 - DNA, 28 bp, Homo Sapiens
gcccggctagctcagtcggtagagcatg

SEQ ID NO: 37470 - DNA, 29 bp, Homo Sapiens
gcccggctagctcagtcggtagagcatga

SEQ ID NO: 37471 - DNA, 30 bp, Homo Sapiens; identical to SEQ ID NO: 16827

SEQ ID NO: 37472 - DNA, 31 bp, Homo Sapiens; identical to SEQ ID NO: 16828

SEQ ID NO: 37473 - DNA, 32 bp, Homo Sapiens; identical to SEQ ID NO: 16829

SEQ ID NO: 37474 - DNA, 33 bp, Homo Sapiens; identical to SEQ ID NO: 16830

SEQ ID NO: 37475 - DNA, 34 bp, Homo Sapiens; identical to SEQ ID NO: 16831

SEQ ID NO: 37476 - DNA, 35 bp, Homo Sapiens; identical to SEQ ID NO: 16832

SEQ ID NO: 37477 - DNA, 33 bp, Homo Sapiens; identical to SEQ ID NO: 16835

SEQ ID NO: 37478 - DNA, 34 bp, Homo Sapiens; identical to SEQ ID NO: 16836

SEQ ID NO: 37479 - DNA, 35 bp, Homo Sapiens; identical to SEQ ID NO: 16837

SEQ ID NO: 37480 - DNA, 36 bp, Homo Sapiens; identical to SEQ ID NO: 16838

SEQ ID NO: 37481 - DNA, 38 bp, Homo Sapiens; identical to SEQ ID NO: 16840

SEQ ID NO: 37482 - DNA, 40 bp, Homo Sapiens; identical to SEQ ID NO: 16842

SEQ ID NO: 37483 - DNA, 41 bp, Homo Sapiens; identical to SEQ ID NO: 16843

SEQ ID NO: 37484 - DNA, 42 bp, Homo Sapiens; identical to SEQ ID NO: 16844

SEQ ID NO: 37485 - DNA, 29 bp, Homo Sapiens
gcccggctagctcagtcggtagagcatgg

SEQ ID NO: 37486 - DNA, 30 bp, Homo Sapiens; identical to SEQ ID NO: 16847

SEQ ID NO: 37487 - DNA, 31 bp, Homo Sapiens; identical to SEQ ID NO: 16848

SEQ ID NO: 37488 - DNA, 32 bp, Homo Sapiens; identical to SEQ ID NO: 16849

SEQ ID NO: 37489 - DNA, 33 bp, Homo Sapiens; identical to SEQ ID NO: 16850

SEQ ID NO: 37490 - DNA, 34 bp, Homo Sapiens; identical to SEQ ID NO: 16851

SEQ ID NO: 37491 - DNA, 35 bp, Homo Sapiens; identical to SEQ ID NO: 16852

SEQ ID NO: 37492 - DNA, 36 bp, Homo Sapiens; identical to SEQ ID NO: 16853

SEQ ID NO: 37493 - DNA, 37 bp, Homo Sapiens; identical to SEQ ID NO: 16854

SEQ ID NO: 37494 - DNA, 38 bp, Homo Sapiens; identical to SEQ ID NO: 16855

SEQ ID NO: 37495 - DNA, 39 bp, Homo Sapiens; identical to SEQ ID NO: 16856

SEQ ID NO: 37496 - DNA, 40 bp, Homo Sapiens; identical to SEQ ID NO: 16857

SEQ ID NO: 37497 - DNA, 41 bp, Homo Sapiens; identical to SEQ ID NO: 16858

SEQ ID NO: 37498 - DNA, 42 bp, Homo Sapiens; identical to SEQ ID NO: 16859

SEQ ID NO: 37499 - DNA, 26 bp, Homo Sapiens
gcccgggttcgactcccggtgtggga

SEQ ID NO: 37500 - DNA, 27 bp, Homo Sapiens
gcccgggttcgactcccggtgtgggaa

SEQ ID NO: 37501 - DNA, 28 bp, Homo Sapiens
gcccgggttcgactcccggtgtgggaac

SEQ ID NO: 37502 - DNA, 29 bp, Homo Sapiens
gcccgggttcgactcccggtgtgggaacc

SEQ ID NO: 37503 - DNA, 27 bp, Homo Sapiens
gcccgggttcgattcccggtcagggaa

SEQ ID NO: 37504 - DNA, 16 bp, Homo Sapiens
gccctcttagcgcagc

SEQ ID NO: 37505 - DNA, 16 bp, Homo Sapiens
gccctcttagcgcagt

SEQ ID NO: 37506 - DNA, 19 bp, Homo Sapiens
gccgaaatagctcagttgg

SEQ ID NO: 37507 - DNA, 20 bp, Homo Sapiens
gccgaaatagctcagttggg

SEQ ID NO: 37508 - DNA, 21 bp, Homo Sapiens
gccgaaatagctcagttggga

SEQ ID NO: 37509 - DNA, 22 bp, Homo Sapiens
gccgaaatagctcagttgggag

SEQ ID NO: 37510 - DNA, 23 bp, Homo Sapiens
gccgaaatagctcagttgggaga

SEQ ID NO: 37511 - DNA, 24 bp, Homo Sapiens
gccgaaatagctcagttgggagag

SEQ ID NO: 37512 - DNA, 25 bp, Homo Sapiens
gccgaaatagctcagttgggagagc

SEQ ID NO: 37513 - DNA, 33 bp, Homo Sapiens; identical to SEQ ID NO: 16890

SEQ ID NO: 37514 - DNA, 17 bp, Homo Sapiens
gccgagcggtctaaggc

SEQ ID NO: 37515 - DNA, 17 bp, Homo Sapiens
gccgaggttgtgagttc

SEQ ID NO: 37516 - DNA, 20 bp, Homo Sapiens
gccgcagcaacctcggttcg

SEQ ID NO: 37517 - DNA, 37 bp, Homo Sapiens; identical to SEQ ID NO: 16902

SEQ ID NO: 37518 - DNA, 38 bp, Homo Sapiens; identical to SEQ ID NO: 16903

SEQ ID NO: 37519 - DNA, 39 bp, Homo Sapiens; identical to SEQ ID NO: 16904

SEQ ID NO: 37520 - DNA, 30 bp, Homo Sapiens; identical to SEQ ID NO: 16909

SEQ ID NO: 37521 - DNA, 31 bp, Homo Sapiens; identical to SEQ ID NO: 16910

SEQ ID NO: 37522 - DNA, 32 bp, Homo Sapiens; identical to SEQ ID NO: 16911

SEQ ID NO: 37523 - DNA, 33 bp, Homo Sapiens; identical to SEQ ID NO: 16912

SEQ ID NO: 37524 - DNA, 34 bp, Homo Sapiens; identical to SEQ ID NO: 16913

SEQ ID NO: 37525 - DNA, 35 bp, Homo Sapiens; identical to SEQ ID NO: 16914

SEQ ID NO: 37526 - DNA, 36 bp, Homo Sapiens; identical to SEQ ID NO: 16915

SEQ ID NO: 37527 - DNA, 27 bp, Homo Sapiens
gccgctggtgtagtggtatcatgcaag

SEQ ID NO: 37528 - DNA, 28 bp, Homo Sapiens
gccgctggtgtagtggtatcatgcaaga

SEQ ID NO: 37529 - DNA, 30 bp, Homo Sapiens; identical to SEQ ID NO: 16926

SEQ ID NO: 37530 - DNA, 32 bp, Homo Sapiens; identical to SEQ ID NO: 16928

SEQ ID NO: 37531 - DNA, 33 bp, Homo Sapiens; identical to SEQ ID NO: 16929

SEQ ID NO: 37532 - DNA, 16 bp, Homo Sapiens
gccgtgatcgtatagt

SEQ ID NO: 37533 - DNA, 17 bp, Homo Sapiens
gccgtgatcgtatagtg

SEQ ID NO: 37534 - DNA, 18 bp, Homo Sapiens
gccgtgatcgtatagtgg

SEQ ID NO: 37535 - DNA, 19 bp, Homo Sapiens
gccgtgatcgtatagtggt

SEQ ID NO: 37536 - DNA, 21 bp, Homo Sapiens
gccgtgatcgtatagtggtta

SEQ ID NO: 37537 - DNA, 22 bp, Homo Sapiens
gccgtgatcgtatagtggttag

SEQ ID NO: 37538 - DNA, 23 bp, Homo Sapiens
gccgtgatcgtatagtggttagt

SEQ ID NO: 37539 - DNA, 24 bp, Homo Sapiens
gccgtgatcgtatagtggttagta

SEQ ID NO: 37540 - DNA, 25 bp, Homo Sapiens
gccgtgatcgtatagtggttagtac

SEQ ID NO: 37541 - DNA, 26 bp, Homo Sapiens
gccgtgatcgtatagtggttagtact

SEQ ID NO: 37542 - DNA, 27 bp, Homo Sapiens
gccgtgatcgtatagtggttagtactc

SEQ ID NO: 37543 - DNA, 28 bp, Homo Sapiens
gccgtgatcgtatagtggttagtactct

SEQ ID NO: 37544 - DNA, 29 bp, Homo Sapiens
gccgtgatcgtatagtggttagtactctg

SEQ ID NO: 37545 - DNA, 30 bp, Homo Sapiens; identical to SEQ ID NO: 16951

SEQ ID NO: 37546 - DNA, 31 bp, Homo Sapiens; identical to SEQ ID NO: 16952

SEQ ID NO: 37547 - DNA, 32 bp, Homo Sapiens; identical to SEQ ID NO: 16953

SEQ ID NO: 37548 - DNA, 33 bp, Homo Sapiens; identical to SEQ ID NO: 16954

SEQ ID NO: 37549 - DNA, 34 bp, Homo Sapiens; identical to SEQ ID NO: 16955

SEQ ID NO: 37550 - DNA, 35 bp, Homo Sapiens; identical to SEQ ID NO: 16956

SEQ ID NO: 37551 - DNA, 36 bp, Homo Sapiens; identical to SEQ ID NO: 16957

SEQ ID NO: 37552 - DNA, 37 bp, Homo Sapiens; identical to SEQ ID NO: 16958

SEQ ID NO: 37553 - DNA, 38 bp, Homo Sapiens; identical to SEQ ID NO: 16959

SEQ ID NO: 37554 - DNA, 39 bp, Homo Sapiens; identical to SEQ ID NO: 16960

SEQ ID NO: 37555 - DNA, 17 bp, Homo Sapiens
gcctacccagggacgcc

SEQ ID NO: 37556 - DNA, 16 bp, Homo Sapiens
gcctcacacggggcac

SEQ ID NO: 37557 - DNA, 16 bp, Homo Sapiens
gcctcacctggagcac

SEQ ID NO: 37558 - DNA, 17 bp, Homo Sapiens
gcctcacctggagcacc

SEQ ID NO: 37559 - DNA, 16 bp, Homo Sapiens
gcctcgttagcgcagt

SEQ ID NO: 37560 - DNA, 19 bp, Homo Sapiens
gcctcgttagcgcagtagg

SEQ ID NO: 37561 - DNA, 32 bp, Homo Sapiens; identical to SEQ ID NO: 17001

SEQ ID NO: 37562 - DNA, 33 bp, Homo Sapiens; identical to SEQ ID NO: 17002

SEQ ID NO: 37563 - DNA, 25 bp, Homo Sapiens
gcctggatagctcagttggtagagc

SEQ ID NO: 37564 - DNA, 32 bp, Homo Sapiens; identical to SEQ ID NO: 17006

SEQ ID NO: 37565 - DNA, 33 bp, Homo Sapiens; identical to SEQ ID NO: 17007

SEQ ID NO: 37566 - DNA, 32 bp, Homo Sapiens; identical to SEQ ID NO: 17013

SEQ ID NO: 37567 - DNA, 33 bp, Homo Sapiens; identical to SEQ ID NO: 17014

SEQ ID NO: 37568 - DNA, 40 bp, Homo Sapiens; identical to SEQ ID NO: 17018

SEQ ID NO: 37569 - DNA, 44 bp, Homo Sapiens; identical to SEQ ID NO: 17019

SEQ ID NO: 37570 - DNA, 39 bp, Homo Sapiens; identical to SEQ ID NO: 17022

SEQ ID NO: 37571 - DNA, 40 bp, Homo Sapiens; identical to SEQ ID NO: 17023

SEQ ID NO: 37572 - DNA, 43 bp, Homo Sapiens; identical to SEQ ID NO: 17026

SEQ ID NO: 37573 - DNA, 44 bp, Homo Sapiens; identical to SEQ ID NO: 17027

SEQ ID NO: 37574 - DNA, 45 bp, Homo Sapiens; identical to SEQ ID NO: 17028

SEQ ID NO: 37575 - DNA, 46 bp, Homo Sapiens; identical to SEQ ID NO: 17029

SEQ ID NO: 37576 - DNA, 43 bp, Homo Sapiens; identical to SEQ ID NO: 17031

SEQ ID NO: 37577 - DNA, 18 bp, Homo Sapiens
gccttggtggtgcagtgg

SEQ ID NO: 37578 - DNA, 30 bp, Homo Sapiens
gccttggtggtgcagtggtagaattctcgc

SEQ ID NO: 37579 - DNA, 31 bp, Homo Sapiens
gccttggtggtgcagtggtagaattctcgcc

SEQ ID NO: 37580 - DNA, 32 bp, Homo Sapiens
gccttggtggtgcagtggtagaattctcgcct

SEQ ID NO: 37581 - DNA, 16 bp, Homo Sapiens
gcgaaaggtccccggt

SEQ ID NO: 37582 - DNA, 26 bp, Homo Sapiens
gcgaaaggtccccggttcgaaaccgg

SEQ ID NO: 37583 - DNA, 28 bp, Homo Sapiens
gcgaaaggtccccggttcgaaaccgggc

SEQ ID NO: 37584 - DNA, 35 bp, Homo Sapiens
gcgaaaggtccccggttcgaaaccgggcagaagca

SEQ ID NO: 37585 - DNA, 36 bp, Homo Sapiens
gcgaaaggtccccggttcgaaaccgggcagaagcac

SEQ ID NO: 37586 - DNA, 37 bp, Homo Sapiens; identical to SEQ ID NO: 17039

SEQ ID NO: 37587 - DNA, 38 bp, Homo Sapiens; identical to SEQ ID NO: 17040

SEQ ID NO: 37588 - DNA, 31 bp, Homo Sapiens
gcgaaaggtccccggttcgaaaccgggcgga

SEQ ID NO: 37589 - DNA, 33 bp, Homo Sapiens; identical to SEQ ID NO: 17042

SEQ ID NO: 37590 - DNA, 34 bp, Homo Sapiens; identical to SEQ ID NO: 17043

SEQ ID NO: 37591 - DNA, 35 bp, Homo Sapiens; identical to SEQ ID NO: 17044

SEQ ID NO: 37592 - DNA, 36 bp, Homo Sapiens; identical to SEQ ID NO: 17045

SEQ ID NO: 37593 - DNA, 37 bp, Homo Sapiens; identical to SEQ ID NO: 17046

SEQ ID NO: 37594 - DNA, 38 bp, Homo Sapiens; identical to SEQ ID NO: 17047

SEQ ID NO: 37595 - DNA, 35 bp, Homo Sapiens; identical to SEQ ID NO: 17051

SEQ ID NO: 37596 - DNA, 36 bp, Homo Sapiens
gcgaaaggtccccggttcgatcccgggcggaaacac

SEQ ID NO: 37597 - DNA, 37 bp, Homo Sapiens; identical to SEQ ID NO: 17052

SEQ ID NO: 37598 - DNA, 38 bp, Homo Sapiens; identical to SEQ ID NO: 17053

SEQ ID NO: 37599 - DNA, 37 bp, Homo Sapiens; identical to SEQ ID NO: 17054

SEQ ID NO: 37600 - DNA, 37 bp, Homo Sapiens
gcgaaaggtccgcggttcgaaaccgggcggaaacacc

SEQ ID NO: 37601 - DNA, 16 bp, Homo Sapiens
gcgagaggtagcggga

SEQ ID NO: 37602 - DNA, 17 bp, Homo Sapiens
gcgagaggtagcgggat

SEQ ID NO: 37603 - DNA, 31 bp, Homo Sapiens; identical to SEQ ID NO: 17061

SEQ ID NO: 37604 - DNA, 32 bp, Homo Sapiens; identical to SEQ ID NO: 17062

SEQ ID NO: 37605 - DNA, 33 bp, Homo Sapiens
gcgagaggtcccgggttcaaatcccggacgagc

SEQ ID NO: 37606 - DNA, 34 bp, Homo Sapiens; identical to SEQ ID NO: 17063

SEQ ID NO: 37607 - DNA, 35 bp, Homo Sapiens; identical to SEQ ID NO: 17064

SEQ ID NO: 37608 - DNA, 36 bp, Homo Sapiens; identical to SEQ ID NO: 17065

SEQ ID NO: 37609 - DNA, 37 bp, Homo Sapiens; identical to SEQ ID NO: 17066

SEQ ID NO: 37610 - DNA, 38 bp, Homo Sapiens; identical to SEQ ID NO: 17067

SEQ ID NO: 37611 - DNA, 26 bp, Homo Sapiens
gcgagttcaaatctcgctggggcctc

SEQ ID NO: 37612 - DNA, 26 bp, Homo Sapiens
gcgagttcgatcctcgctggggcctc

SEQ ID NO: 37613 - DNA, 22 bp, Homo Sapiens
gcgatccgagttcaaatctcgg

SEQ ID NO: 37614 - DNA, 28 bp, Homo Sapiens
gcgatccgagttcaaatctcggtggaac

SEQ ID NO: 37615 - DNA, 29 bp, Homo Sapiens
gcgatccgagttcaaatctcggtggaacc

SEQ ID NO: 37616 - DNA, 31 bp, Homo Sapiens; identical to SEQ ID NO: 17074

SEQ ID NO: 37617 - DNA, 32 bp, Homo Sapiens; identical to SEQ ID NO: 17075

SEQ ID NO: 37618 - DNA, 28 bp, Homo Sapiens
gcgatccgagttcaaatctcggtgggac

SEQ ID NO: 37619 - DNA, 31 bp, Homo Sapiens; identical to SEQ ID NO: 17078

SEQ ID NO: 37620 - DNA, 31 bp, Homo Sapiens
gcgatccgagttcaagtctcggtggaacctc

SEQ ID NO: 37621 - DNA, 31 bp, Homo Sapiens; identical to SEQ ID NO: 17081

SEQ ID NO: 37622 - DNA, 24 bp, Homo Sapiens
gcgcaatggataacgcgtctgact

SEQ ID NO: 37623 - DNA, 22 bp, Homo Sapiens
gcgcagcggaagcgtgctgggc

SEQ ID NO: 37624 - DNA, 16 bp, Homo Sapiens
gcgccgctggtgtagt

SEQ ID NO: 37625 - DNA, 17 bp, Homo Sapiens
gcgccgctggtgtagtg

SEQ ID NO: 37626 - DNA, 18 bp, Homo Sapiens
gcgccgctggtgtagtgg

SEQ ID NO: 37627 - DNA, 19 bp, Homo Sapiens
gcgccgctggtgtagtggt

SEQ ID NO: 37628 - DNA, 20 bp, Homo Sapiens
gcgccgctggtgtagtggta

SEQ ID NO: 37629 - DNA, 21 bp, Homo Sapiens
gcgccgctggtgtagtggtat

SEQ ID NO: 37630 - DNA, 22 bp, Homo Sapiens
gcgccgctggtgtagtggtatc

SEQ ID NO: 37631 - DNA, 23 bp, Homo Sapiens
gcgccgctggtgtagtggtatca

SEQ ID NO: 37632 - DNA, 24 bp, Homo Sapiens
gcgccgctggtgtagtggtatcat

SEQ ID NO: 37633 - DNA, 25 bp, Homo Sapiens
gcgccgctggtgtagtggtatcatg

SEQ ID NO: 37634 - DNA, 26 bp, Homo Sapiens
gcgccgctggtgtagtggtatcatgc

SEQ ID NO: 37635 - DNA, 27 bp, Homo Sapiens
gcgccgctggtgtagtggtatcatgca

SEQ ID NO: 37636 - DNA, 28 bp, Homo Sapiens
gcgccgctggtgtagtggtatcatgcaa

SEQ ID NO: 37637 - DNA, 29 bp, Homo Sapiens
gcgccgctggtgtagtggtatcatgcaag

SEQ ID NO: 37638 - DNA, 30 bp, Homo Sapiens; identical to SEQ ID NO: 17110

SEQ ID NO: 37639 - DNA, 31 bp, Homo Sapiens; identical to SEQ ID NO: 17111

SEQ ID NO: 37640 - DNA, 32 bp, Homo Sapiens; identical to SEQ ID NO: 17112

SEQ ID NO: 37641 - DNA, 33 bp, Homo Sapiens; identical to SEQ ID NO: 17113

SEQ ID NO: 37642 - DNA, 34 bp, Homo Sapiens; identical to SEQ ID NO: 17114

SEQ ID NO: 37643 - DNA, 35 bp, Homo Sapiens; identical to SEQ ID NO: 17115

SEQ ID NO: 37644 - DNA, 36 bp, Homo Sapiens; identical to SEQ ID NO: 17116

SEQ ID NO: 37645 - DNA, 37 bp, Homo Sapiens; identical to SEQ ID NO: 17117

SEQ ID NO: 37646 - DNA, 39 bp, Homo Sapiens; identical to SEQ ID NO: 17118

SEQ ID NO: 37647 - DNA, 44 bp, Homo Sapiens; identical to SEQ ID NO: 17121

SEQ ID NO: 37648 - DNA, 47 bp, Homo Sapiens
gcgccgctggtgtagtggtatcatgcaagattcccattcttgcgacc

SEQ ID NO: 37649 - DNA, 33 bp, Homo Sapiens; identical to SEQ ID NO: 17144

SEQ ID NO: 37650 - DNA, 44 bp, Homo Sapiens; identical to SEQ ID NO: 17148

SEQ ID NO: 37651 - DNA, 45 bp, Homo Sapiens; identical to SEQ ID NO: 17149

SEQ ID NO: 37652 - DNA, 17 bp, Homo Sapiens
gcgctggatttaggctc

SEQ ID NO: 37653 - DNA, 16 bp, Homo Sapiens
gcggaagcgtgctggg

SEQ ID NO: 37654 - DNA, 17 bp, Homo Sapiens
gcggaagcgtgctgggc

SEQ ID NO: 37655 - DNA, 18 bp, Homo Sapiens
gcggaagcgtgctgggcc

SEQ ID NO: 37656 - DNA, 19 bp, Homo Sapiens
gcggaagcgtgctgggccc

SEQ ID NO: 37657 - DNA, 20 bp, Homo Sapiens
gcggaagcgtgctgggccca

SEQ ID NO: 37658 - DNA, 25 bp, Homo Sapiens
gcggaagcgtgctgggcccataacc

SEQ ID NO: 37659 - DNA, 26 bp, Homo Sapiens
gcggaagcgtgctgggcccataaccc

SEQ ID NO: 37660 - DNA, 16 bp, Homo Sapiens
gcggcccgggttcgac

SEQ ID NO: 37661 - DNA, 17 bp, Homo Sapiens
gcggcccgggttcgact

SEQ ID NO: 37662 - DNA, 18 bp, Homo Sapiens
gcggcccgggttcgactc

SEQ ID NO: 37663 - DNA, 19 bp, Homo Sapiens
gcggcccgggttcgactcc

SEQ ID NO: 37664 - DNA, 20 bp, Homo Sapiens
gcggcccgggttcgactccc

SEQ ID NO: 37665 - DNA, 21 bp, Homo Sapiens
gcggcccgggttcgactcccg

SEQ ID NO: 37666 - DNA, 22 bp, Homo Sapiens
gcggcccgggttcgactcccgg

SEQ ID NO: 37667 - DNA, 23 bp, Homo Sapiens
gcggcccgggttcgactcccggt

SEQ ID NO: 37668 - DNA, 24 bp, Homo Sapiens
gcggcccgggttcgactcccggtg

SEQ ID NO: 37669 - DNA, 25 bp, Homo Sapiens
gcggcccgggttcgactcccggtgt

SEQ ID NO: 37670 - DNA, 26 bp, Homo Sapiens
gcggcccgggttcgactcccggtgtg

SEQ ID NO: 37671 - DNA, 27 bp, Homo Sapiens
gcggcccgggttcgactcccggtgtgg

SEQ ID NO: 37672 - DNA, 28 bp, Homo Sapiens
gcggcccgggttcgactcccggtgtggg

SEQ ID NO: 37673 - DNA, 29 bp, Homo Sapiens
gcggcccgggttcgactcccggtgtggga

SEQ ID NO: 37674 - DNA, 30 bp, Homo Sapiens; identical to SEQ ID NO: 17183

SEQ ID NO: 37675 - DNA, 31 bp, Homo Sapiens; identical to SEQ ID NO: 17184

SEQ ID NO: 37676 - DNA, 32 bp, Homo Sapiens; identical to SEQ ID NO: 17185

SEQ ID NO: 37677 - DNA, 33 bp, Homo Sapiens; identical to SEQ ID NO: 17186

SEQ ID NO: 37678 - DNA, 17 bp, Homo Sapiens
gcggcccgggttcgatt

SEQ ID NO: 37679 - DNA, 18 bp, Homo Sapiens
gcggcccgggttcgattc

SEQ ID NO: 37680 - DNA, 19 bp, Homo Sapiens
gcggcccgggttcgattcc

SEQ ID NO: 37681 - DNA, 20 bp, Homo Sapiens
gcggcccgggttcgattccc

SEQ ID NO: 37682 - DNA, 21 bp, Homo Sapiens
gcggcccgggttcgattcccg

SEQ ID NO: 37683 - DNA, 23 bp, Homo Sapiens
gcggcccgggttcgattcccggt

SEQ ID NO: 37684 - DNA, 24 bp, Homo Sapiens
gcggcccgggttcgattcccggtc

SEQ ID NO: 37685 - DNA, 25 bp, Homo Sapiens
gcggcccgggttcgattcccggtca

SEQ ID NO: 37686 - DNA, 26 bp, Homo Sapiens
gcggcccgggttcgattcccggtcag

SEQ ID NO: 37687 - DNA, 27 bp, Homo Sapiens
gcggcccgggttcgattcccggtcagg

SEQ ID NO: 37688 - DNA, 28 bp, Homo Sapiens
gcggcccgggttcgattcccggtcaggg

SEQ ID NO: 37689 - DNA, 29 bp, Homo Sapiens
gcggcccgggttcgattcccggtcaggga

SEQ ID NO: 37690 - DNA, 30 bp, Homo Sapiens; identical to SEQ ID NO: 17201

SEQ ID NO: 37691 - DNA, 31 bp, Homo Sapiens; identical to SEQ ID NO: 17202

SEQ ID NO: 37692 - DNA, 32 bp, Homo Sapiens; identical to SEQ ID NO: 17203

SEQ ID NO: 37693 - DNA, 33 bp, Homo Sapiens; identical to SEQ ID NO: 17204

SEQ ID NO: 37694 - DNA, 31 bp, Homo Sapiens; identical to SEQ ID NO: 17213

SEQ ID NO: 37695 - DNA, 34 bp, Homo Sapiens; identical to SEQ ID NO: 17216

SEQ ID NO: 37696 - DNA, 35 bp, Homo Sapiens; identical to SEQ ID NO: 17217

SEQ ID NO: 37697 - DNA, 36 bp, Homo Sapiens; identical to SEQ ID NO: 17218

SEQ ID NO: 37698 - DNA, 37 bp, Homo Sapiens; identical to SEQ ID NO: 17219

SEQ ID NO: 37699 - DNA, 35 bp, Homo Sapiens; identical to SEQ ID NO: 17221

SEQ ID NO: 37700 - DNA, 36 bp, Homo Sapiens; identical to SEQ ID NO: 17222

SEQ ID NO: 37701 - DNA, 29 bp, Homo Sapiens
gcgggagaccggggttcgattccccgacg

SEQ ID NO: 37702 - DNA, 30 bp, Homo Sapiens; identical to SEQ ID NO: 17228

SEQ ID NO: 37703 - DNA, 31 bp, Homo Sapiens; identical to SEQ ID NO: 17229

SEQ ID NO: 37704 - DNA, 32 bp, Homo Sapiens; identical to SEQ ID NO: 17230

SEQ ID NO: 37705 - DNA, 33 bp, Homo Sapiens; identical to SEQ ID NO: 17231

SEQ ID NO: 37706 - DNA, 34 bp, Homo Sapiens; identical to SEQ ID NO: 17232

SEQ ID NO: 37707 - DNA, 35 bp, Homo Sapiens; identical to SEQ ID NO: 17233

SEQ ID NO: 37708 - DNA, 36 bp, Homo Sapiens; identical to SEQ ID NO: 17234

SEQ ID NO: 37709 - DNA, 37 bp, Homo Sapiens; identical to SEQ ID NO: 17235

SEQ ID NO: 37710 - DNA, 27 bp, Homo Sapiens
gcgggaggcccgggttcgattcccggc

SEQ ID NO: 37711 - DNA, 30 bp, Homo Sapiens; identical to SEQ ID NO: 17241

SEQ ID NO: 37712 - DNA, 32 bp, Homo Sapiens; identical to SEQ ID NO: 17243

SEQ ID NO: 37713 - DNA, 33 bp, Homo Sapiens; identical to SEQ ID NO: 17244

SEQ ID NO: 37714 - DNA, 34 bp, Homo Sapiens; identical to SEQ ID NO: 17245

SEQ ID NO: 37715 - DNA, 35 bp, Homo Sapiens; identical to SEQ ID NO: 17246

SEQ ID NO: 37716 - DNA, 36 bp, Homo Sapiens; identical to SEQ ID NO: 17247

SEQ ID NO: 37717 - DNA, 37 bp, Homo Sapiens; identical to SEQ ID NO: 17248

SEQ ID NO: 37718 - DNA, 25 bp, Homo Sapiens
gcgggttcgaaccccgtccgtgcct

SEQ ID NO: 37719 - DNA, 19 bp, Homo Sapiens
gcggttaggattcctggtt

SEQ ID NO: 37720 - DNA, 21 bp, Homo Sapiens
gcggttaggattcctggtttt

SEQ ID NO: 37721 - DNA, 18 bp, Homo Sapiens
gcggttatcacgtctgct

SEQ ID NO: 37722 - DNA, 19 bp, Homo Sapiens
gcggttatcacgtctgctt

SEQ ID NO: 37723 - DNA, 20 bp, Homo Sapiens
gcggttatcacgtctgcttt

SEQ ID NO: 37724 - DNA, 19 bp, Homo Sapiens
gcgtgctgggcccataacc

SEQ ID NO: 37725 - DNA, 20 bp, Homo Sapiens
gcgtgctgggcccataaccc

SEQ ID NO: 37726 - DNA, 22 bp, Homo Sapiens
gcgtgctgggcccataacccag

SEQ ID NO: 37727 - DNA, 23 bp, Homo Sapiens
gcgtgctgggcccataacccaga

SEQ ID NO: 37728 - DNA, 28 bp, Homo Sapiens
gcgtgctgggcccataacccagaggtcg

SEQ ID NO: 37729 - DNA, 30 bp, Homo Sapiens; identical to SEQ ID NO: 17278

SEQ ID NO: 37730 - DNA, 31 bp, Homo Sapiens; identical to SEQ ID NO: 17279

SEQ ID NO: 37731 - DNA, 34 bp, Homo Sapiens; identical to SEQ ID NO: 17281

SEQ ID NO: 37732 - DNA, 35 bp, Homo Sapiens; identical to SEQ ID NO: 17282

SEQ ID NO: 37733 - DNA, 36 bp, Homo Sapiens; identical to SEQ ID NO: 17283

SEQ ID NO: 37734 - DNA, 22 bp, Homo Sapiens
gcgtggccgagcggtctaaggc

SEQ ID NO: 37735 - DNA, 24 bp, Homo Sapiens
gcgtggcctaatggataaggcgtc

SEQ ID NO: 37736 - DNA, 27 bp, Homo Sapiens
gcgtggcctaatggataaggcgtctga

SEQ ID NO: 37737 - DNA, 29 bp, Homo Sapiens
gcgtggcctaatggataaggcgtctgact

SEQ ID NO: 37738 - DNA, 29 bp, Homo Sapiens
gcgtgggttcgaatcccaccctcgtcgcc

SEQ ID NO: 37739 - DNA, 29 bp, Homo Sapiens
gcgtgggttcgaatcccaccttcgtcgcc

SEQ ID NO: 37740 - DNA, 27 bp, Homo Sapiens
gcgtgggttcgaatcccatcctcgtcg

SEQ ID NO: 37741 - DNA, 28 bp, Homo Sapiens
gcgtgggttcgaatcccatcctcgtcgc

SEQ ID NO: 37742 - DNA, 29 bp, Homo Sapiens
gcgtgggttcgaatcccatcctcgtcgcc

SEQ ID NO: 37743 - DNA, 30 bp, Homo Sapiens; identical to SEQ ID NO: 17298

SEQ ID NO: 37744 - DNA, 26 bp, Homo Sapiens
gcgtgttcgaatcacgtcggggtcac

SEQ ID NO: 37745 - DNA, 27 bp, Homo Sapiens
gcgtgttcgaatcacgtcggggtcacc

SEQ ID NO: 37746 - DNA, 21 bp, Homo Sapiens
gcgttcaggtcgcagtctccc

SEQ ID NO: 37747 - DNA, 21 bp, Homo Sapiens
gcgttcgattcccggtcaggg

SEQ ID NO: 37748 - DNA, 22 bp, Homo Sapiens
gcgttcgattcccggtcaggga

SEQ ID NO: 37749 - DNA, 23 bp, Homo Sapiens
gcgttcgattcccggtcagggaa

SEQ ID NO: 37750 - DNA, 24 bp, Homo Sapiens
gcgttcgattcccggtcagggaac

SEQ ID NO: 37751 - DNA, 25 bp, Homo Sapiens
gcgttcgattcccggtcagggaacc

SEQ ID NO: 37752 - DNA, 16 bp, Homo Sapiens
gcgttcggctgttaac

SEQ ID NO: 37753 - DNA, 17 bp, Homo Sapiens
gcgttcggctgttaacc

SEQ ID NO: 37754 - DNA, 16 bp, Homo Sapiens
gcgttggtggtatagt

SEQ ID NO: 37755 - DNA, 17 bp, Homo Sapiens
gcgttggtggtatagtg

SEQ ID NO: 37756 - DNA, 18 bp, Homo Sapiens
gcgttggtggtatagtgg

SEQ ID NO: 37757 - DNA, 19 bp, Homo Sapiens
gcgttggtggtatagtggt

SEQ ID NO: 37758 - DNA, 33 bp, Homo Sapiens; identical to SEQ ID NO: 17320

SEQ ID NO: 37759 - DNA, 34 bp, Homo Sapiens; identical to SEQ ID NO: 17321

SEQ ID NO: 37760 - DNA, 23 bp, Homo Sapiens
gcgttggtggtatagtggtgagc

SEQ ID NO: 37761 - DNA, 24 bp, Homo Sapiens
gcgttggtggtatagtggtgagca

SEQ ID NO: 37762 - DNA, 26 bp, Homo Sapiens
gcgttggtggtatagtggtgagcata

SEQ ID NO: 37763 - DNA, 28 bp, Homo Sapiens
gcgttggtggtatagtggtgagcatagc

SEQ ID NO: 37764 - DNA, 29 bp, Homo Sapiens
gcgttggtggtatagtggtgagcatagct

SEQ ID NO: 37765 - DNA, 30 bp, Homo Sapiens; identical to SEQ ID NO: 17335

SEQ ID NO: 37766 - DNA, 31 bp, Homo Sapiens; identical to SEQ ID NO: 17336

SEQ ID NO: 37767 - DNA, 32 bp, Homo Sapiens; identical to SEQ ID NO: 17337

SEQ ID NO: 37768 - DNA, 33 bp, Homo Sapiens; identical to SEQ ID NO: 17338

SEQ ID NO: 37769 - DNA, 34 bp, Homo Sapiens; identical to SEQ ID NO: 17339

SEQ ID NO: 37770 - DNA, 35 bp, Homo Sapiens; identical to SEQ ID NO: 17340

SEQ ID NO: 37771 - DNA, 36 bp, Homo Sapiens; identical to SEQ ID NO: 17341

SEQ ID NO: 37772 - DNA, 23 bp, Homo Sapiens
gcgttggtggtatagtggttagc

SEQ ID NO: 37773 - DNA, 26 bp, Homo Sapiens
gcgttggtggtatagtggttagcata

SEQ ID NO: 37774 - DNA, 28 bp, Homo Sapiens
gcgttggtggtatagtggttagcatagc

SEQ ID NO: 37775 - DNA, 29 bp, Homo Sapiens
gcgttggtggtatagtggttagcatagct

SEQ ID NO: 37776 - DNA, 30 bp, Homo Sapiens; identical to SEQ ID NO: 17358

SEQ ID NO: 37777 - DNA, 31 bp, Homo Sapiens; identical to SEQ ID NO: 17359

SEQ ID NO: 37778 - DNA, 32 bp, Homo Sapiens; identical to SEQ ID NO: 17360

SEQ ID NO: 37779 - DNA, 33 bp, Homo Sapiens; identical to SEQ ID NO: 17361

SEQ ID NO: 37780 - DNA, 34 bp, Homo Sapiens; identical to SEQ ID NO: 17362

SEQ ID NO: 37781 - DNA, 35 bp, Homo Sapiens; identical to SEQ ID NO: 17363

SEQ ID NO: 37782 - DNA, 36 bp, Homo Sapiens; identical to SEQ ID NO: 17364

SEQ ID NO: 37783 - DNA, 32 bp, Homo Sapiens; identical to SEQ ID NO: 17369

SEQ ID NO: 37784 - DNA, 18 bp, Homo Sapiens
gctaaataagctatcggg

SEQ ID NO: 37785 - DNA, 19 bp, Homo Sapiens
gctaaataagctatcgggc

SEQ ID NO: 37786 - DNA, 21 bp, Homo Sapiens
gctaaataagctatcgggccc

SEQ ID NO: 37787 - DNA, 34 bp, Homo Sapiens; identical to SEQ ID NO: 17405

SEQ ID NO: 37788 - DNA, 42 bp, Homo Sapiens; identical to SEQ ID NO: 17412

SEQ ID NO: 37789 - DNA, 43 bp, Homo Sapiens; identical to SEQ ID NO: 17413

SEQ ID NO: 37790 - DNA, 32 bp, Homo Sapiens; identical to SEQ ID NO: 17429

SEQ ID NO: 37791 - DNA, 33 bp, Homo Sapiens; identical to SEQ ID NO: 17430

SEQ ID NO: 37792 - DNA, 34 bp, Homo Sapiens; identical to SEQ ID NO: 17431

SEQ ID NO: 37793 - DNA, 35 bp, Homo Sapiens; identical to SEQ ID NO: 17432

SEQ ID NO: 37794 - DNA, 16 bp, Homo Sapiens
gctagctcagtcggta

SEQ ID NO: 37795 - DNA, 17 bp, Homo Sapiens
gctagctcagtcggtag

SEQ ID NO: 37796 - DNA, 18 bp, Homo Sapiens
gctagctcagtcggtaga

SEQ ID NO: 37797 - DNA, 19 bp, Homo Sapiens
gctagctcagtcggtagag

SEQ ID NO: 37798 - DNA, 23 bp, Homo Sapiens
gctagctcagtcggtagagcatg

SEQ ID NO: 37799 - DNA, 27 bp, Homo Sapiens
gctagctcagtcggtagagcatgagac

SEQ ID NO: 37800 - DNA, 28 bp, Homo Sapiens
gctagctcagtcggtagagcatgagact

SEQ ID NO: 37801 - DNA, 29 bp, Homo Sapiens
gctagctcagtcggtagagcatgagactc

SEQ ID NO: 37802 - DNA, 45 bp, Homo Sapiens
gctagctcagtcggtagagcatgagactcttaatctcagggtcgt

SEQ ID NO: 37803 - DNA, 47 bp, Homo Sapiens; identical to SEQ ID NO: 17455

SEQ ID NO: 37804 - DNA, 25 bp, Homo Sapiens
gctagctcagtcggtagagcatggg

SEQ ID NO: 37805 - DNA, 27 bp, Homo Sapiens
gctagctcagtcggtagagcatgggac

SEQ ID NO: 37806 - DNA, 28 bp, Homo Sapiens
gctagctcagtcggtagagcatgggact

SEQ ID NO: 37807 - DNA, 29 bp, Homo Sapiens
gctagctcagtcggtagagcatgggactc

SEQ ID NO: 37808 - DNA, 30 bp, Homo Sapiens; identical to SEQ ID NO: 17462

SEQ ID NO: 37809 - DNA, 31 bp, Homo Sapiens; identical to SEQ ID NO: 17463

SEQ ID NO: 37810 - DNA, 36 bp, Homo Sapiens; identical to SEQ ID NO: 17468

SEQ ID NO: 37811 - DNA, 44 bp, Homo Sapiens; identical to SEQ ID NO: 17470

SEQ ID NO: 37812 - DNA, 47 bp, Homo Sapiens; identical to SEQ ID NO: 17473

SEQ ID NO: 37813 - DNA, 17 bp, Homo Sapiens
gctatcgggcccatacc

SEQ ID NO: 37814 - DNA, 19 bp, Homo Sapiens
gctcacaagaactgctaac

SEQ ID NO: 37815 - DNA, 20 bp, Homo Sapiens
gctcacaagaactgctaact

SEQ ID NO: 37816 - DNA, 21 bp, Homo Sapiens
gctcacaagaactgctaactc

SEQ ID NO: 37817 - DNA, 29 bp, Homo Sapiens
gctcacaagaactgctaactcatgccccc

SEQ ID NO: 37818 - DNA, 32 bp, Homo Sapiens; identical to SEQ ID NO: 17523

SEQ ID NO: 37819 - DNA, 23 bp, Homo Sapiens
gctcacatcaccccataaacacc

SEQ ID NO: 37820 - DNA, 24 bp, Homo Sapiens
gctcacatcaccccataaacacca

SEQ ID NO: 37821 - DNA, 23 bp, Homo Sapiens
gctcaggggtagagcatttgact

SEQ ID NO: 37822 - DNA, 16 bp, Homo Sapiens
gctcagtcggtagagc

SEQ ID NO: 37823 - DNA, 23 bp, Homo Sapiens
gctcagtcggtagagcatcagac

SEQ ID NO: 37824 - DNA, 24 bp, Homo Sapiens
gctcagtcggtagagcatcagact

SEQ ID NO: 37825 - DNA, 23 bp, Homo Sapiens
gctcagtcggtagagcatgagac

SEQ ID NO: 37826 - DNA, 24 bp, Homo Sapiens
gctcagtcggtagagcatgagact

SEQ ID NO: 37827 - DNA, 25 bp, Homo Sapiens
gctcagtcggtagagcatgagactc

SEQ ID NO: 37828 - DNA, 32 bp, Homo Sapiens; identical to SEQ ID NO: 17569

SEQ ID NO: 37829 - DNA, 23 bp, Homo Sapiens
gctcagtcggtagagcatgggac

SEQ ID NO: 37830 - DNA, 24 bp, Homo Sapiens
gctcagtcggtagagcatgggact

SEQ ID NO: 37831 - DNA, 25 bp, Homo Sapiens
gctcagtcggtagagcatgggactc

SEQ ID NO: 37832 - DNA, 26 bp, Homo Sapiens
gctcagtcggtagagcatgggactct

SEQ ID NO: 37833 - DNA, 30 bp, Homo Sapiens; identical to SEQ ID NO: 17581

SEQ ID NO: 37834 - DNA, 31 bp, Homo Sapiens; identical to SEQ ID NO: 17582

SEQ ID NO: 37835 - DNA, 32 bp, Homo Sapiens; identical to SEQ ID NO: 17583

SEQ ID NO: 37836 - DNA, 33 bp, Homo Sapiens; identical to SEQ ID NO: 17584

SEQ ID NO: 37837 - DNA, 43 bp, Homo Sapiens; identical to SEQ ID NO: 17586

SEQ ID NO: 37838 - DNA, 23 bp, Homo Sapiens
gctcagtggtagagcatttgact

SEQ ID NO: 37839 - DNA, 46 bp, Homo Sapiens
gctccagtctcttcgggggcgtgggttcgaatcccaccgctgccac

SEQ ID NO: 37840 - DNA, 47 bp, Homo Sapiens; identical to SEQ ID NO: 17601

SEQ ID NO: 37841 - DNA, 18 bp, Homo Sapiens
gctccagtggcgcaatcg

SEQ ID NO: 37842 - DNA, 19 bp, Homo Sapiens
gctccagtggcgcaatcgg

SEQ ID NO: 37843 - DNA, 20 bp, Homo Sapiens
gctccagtggcgcaatcggt

SEQ ID NO: 37844 - DNA, 16 bp, Homo Sapiens
gctccatagctcaggg

SEQ ID NO: 37845 - DNA, 23 bp, Homo Sapiens
gctccgaggtgattttcatattg

SEQ ID NO: 37846 - DNA, 28 bp, Homo Sapiens
gctccgaggtgattttcatattgaattg

SEQ ID NO: 37847 - DNA, 38 bp, Homo Sapiens; identical to SEQ ID NO: 17634

SEQ ID NO: 37848 - DNA, 32 bp, Homo Sapiens; identical to SEQ ID NO: 17641

SEQ ID NO: 37849 - DNA, 31 bp, Homo Sapiens; identical to SEQ ID NO: 17646

SEQ ID NO: 37850 - DNA, 17 bp, Homo Sapiens
gctctcaccgccgcggc

SEQ ID NO: 37851 - DNA, 19 bp, Homo Sapiens
gctctcaccgccgcggccc

SEQ ID NO: 37852 - DNA, 42 bp, Homo Sapiens; identical to SEQ ID NO: 17670

SEQ ID NO: 37853 - DNA, 43 bp, Homo Sapiens; identical to SEQ ID NO: 17671

SEQ ID NO: 37854 - DNA, 19 bp, Homo Sapiens
gctgagtgaagcattggac

SEQ ID NO: 37855 - DNA, 29 bp, Homo Sapiens
gctgcgtgttcgaatcacgtcggggtcac

SEQ ID NO: 37856 - DNA, 18 bp, Homo Sapiens
gctggggattgtgggttc

SEQ ID NO: 37857 - DNA, 35 bp, Homo Sapiens; identical to SEQ ID NO: 17705

SEQ ID NO: 37858 - DNA, 36 bp, Homo Sapiens; identical to SEQ ID NO: 17706

SEQ ID NO: 37859 - DNA, 37 bp, Homo Sapiens; identical to SEQ ID NO: 17707

SEQ ID NO: 37860 - DNA, 38 bp, Homo Sapiens; identical to SEQ ID NO: 17708

SEQ ID NO: 37861 - DNA, 17 bp, Homo Sapiens
gctggtgtagtggtatc

SEQ ID NO: 37862 - DNA, 20 bp, Homo Sapiens
gctggtgtagtggtatcatg

SEQ ID NO: 37863 - DNA, 25 bp, Homo Sapiens
gctggtgtagtggtatcatgcaaga

SEQ ID NO: 37864 - DNA, 26 bp, Homo Sapiens
gctggtgtagtggtatcatgcaagat

SEQ ID NO: 37865 - DNA, 27 bp, Homo Sapiens
gctggtgtagtggtatcatgcaagatt

SEQ ID NO: 37866 - DNA, 45 bp, Homo Sapiens; identical to SEQ ID NO: 17728

SEQ ID NO: 37867 - DNA, 47 bp, Homo Sapiens; identical to SEQ ID NO: 17730

SEQ ID NO: 37868 - DNA, 26 bp, Homo Sapiens
gctggttcgaatccggctcgaaggac

SEQ ID NO: 37869 - DNA, 27 bp, Homo Sapiens
gctggttcgaatccggctcgaaggacc

SEQ ID NO: 37870 - DNA, 26 bp, Homo Sapiens
gctggttcgaatccggctcggaggac

SEQ ID NO: 37871 - DNA, 27 bp, Homo Sapiens
gctggttcgaatccggctcggaggacc

SEQ ID NO: 37872 - DNA, 27 bp, Homo Sapiens
gctggttcgattccggctcgaaggacc

SEQ ID NO: 37873 - DNA, 16 bp, Homo Sapiens
gctgtgatggccgagt

SEQ ID NO: 37874 - DNA, 18 bp, Homo Sapiens
gctgtgatggccgagtgg

SEQ ID NO: 37875 - DNA, 24 bp, Homo Sapiens
gctgtgatggccgagtggttaagg

SEQ ID NO: 37876 - DNA, 25 bp, Homo Sapiens
gctgtgatggccgagtggttaaggc

SEQ ID NO: 37877 - DNA, 33 bp, Homo Sapiens
gctgtgatggccgagtggttaaggcgttggact

SEQ ID NO: 37878 - DNA, 22 bp, Homo Sapiens
gctgttaaccgaaaggttggtg

SEQ ID NO: 37879 - DNA, 23 bp, Homo Sapiens
gcttagcggtagagcatttgact

SEQ ID NO: 37880 - DNA, 16 bp, Homo Sapiens
gcttcaaacctgccgg

SEQ ID NO: 37881 - DNA, 17 bp, Homo Sapiens
gcttcaaacctgccggg

SEQ ID NO: 37882 - DNA, 18 bp, Homo Sapiens
gcttcaaacctgccgggg

SEQ ID NO: 37883 - DNA, 19 bp, Homo Sapiens
gcttcaaacctgccggggc

SEQ ID NO: 37884 - DNA, 20 bp, Homo Sapiens
gcttcaaacctgccggggct

SEQ ID NO: 37885 - DNA, 21 bp, Homo Sapiens
gcttcaaacctgccggggctt

SEQ ID NO: 37886 - DNA, 22 bp, Homo Sapiens
gcttcaaacctgccggggcttc

SEQ ID NO: 37887 - DNA, 23 bp, Homo Sapiens
gcttcaaacctgccggggcttcc

SEQ ID NO: 37888 - DNA, 16 bp, Homo Sapiens
gcttctgtagtgtagt

SEQ ID NO: 37889 - DNA, 17 bp, Homo Sapiens
gcttctgtagtgtagtg

SEQ ID NO: 37890 - DNA, 18 bp, Homo Sapiens
gcttctgtagtgtagtgg

SEQ ID NO: 37891 - DNA, 19 bp, Homo Sapiens
gcttctgtagtgtagtggt

SEQ ID NO: 37892 - DNA, 23 bp, Homo Sapiens
gcttctgtagtgtagtggttatc

SEQ ID NO: 37893 - DNA, 24 bp, Homo Sapiens
gcttctgtagtgtagtggttatca

SEQ ID NO: 37894 - DNA, 25 bp, Homo Sapiens
gcttctgtagtgtagtggttatcac

SEQ ID NO: 37895 - DNA, 26 bp, Homo Sapiens
gcttctgtagtgtagtggttatcacg

SEQ ID NO: 37896 - DNA, 28 bp, Homo Sapiens
gcttctgtagtgtagtggttatcacgtt

SEQ ID NO: 37897 - DNA, 29 bp, Homo Sapiens
gcttctgtagtgtagtggttatcacgttc

SEQ ID NO: 37898 - DNA, 30 bp, Homo Sapiens; identical to SEQ ID NO: 17799

SEQ ID NO: 37899 - DNA, 31 bp, Homo Sapiens; identical to SEQ ID NO: 17800

SEQ ID NO: 37900 - DNA, 32 bp, Homo Sapiens; identical to SEQ ID NO: 17801

SEQ ID NO: 37901 - DNA, 33 bp, Homo Sapiens; identical to SEQ ID NO: 17802

SEQ ID NO: 37902 - DNA, 34 bp, Homo Sapiens; identical to SEQ ID NO: 17803

SEQ ID NO: 37903 - DNA, 35 bp, Homo Sapiens; identical to SEQ ID NO: 17804

SEQ ID NO: 37904 - DNA, 36 bp, Homo Sapiens; identical to SEQ ID NO: 17805

SEQ ID NO: 37905 - DNA, 37 bp, Homo Sapiens; identical to SEQ ID NO: 17806

SEQ ID NO: 37906 - DNA, 39 bp, Homo Sapiens; identical to SEQ ID NO: 17808

SEQ ID NO: 37907 - DNA, 40 bp, Homo Sapiens; identical to SEQ ID NO: 17809

SEQ ID NO: 37908 - DNA, 43 bp, Homo Sapiens; identical to SEQ ID NO: 17811

SEQ ID NO: 37909 - DNA, 45 bp, Homo Sapiens
gcttctgtagtgtagtggttatcacgttcgcctcacacgcgaaag

SEQ ID NO: 37910 - DNA, 22 bp, Homo Sapiens
gctttacacgcagaaggtcctg

SEQ ID NO: 37911 - DNA, 19 bp, Homo Sapiens
gctttcaccgccgcggccc

SEQ ID NO: 37912 - DNA, 42 bp, Homo Sapiens
gctttcaccgccgcggcccgggttcgattcccggtcagggaa

SEQ ID NO: 37913 - DNA, 37 bp, Homo Sapiens
gctttgcacgcgtgggttcgaatcccatcctcgtcgc

SEQ ID NO: 37914 - DNA, 38 bp, Homo Sapiens
gctttgcacgcgtgggttcgaatcccatcctcgtcgcc

SEQ ID NO: 37915 - DNA, 19 bp, Homo Sapiens
gctttgcacgtatgaggcc

SEQ ID NO: 37916 - DNA, 21 bp, Homo Sapiens
gctttgcacgtatgaggcccc

SEQ ID NO: 37917 - DNA, 23 bp, Homo Sapiens
gctttgcacgtatgaggccccgg

SEQ ID NO: 37918 - DNA, 40 bp, Homo Sapiens; identical to SEQ ID NO: 17827

SEQ ID NO: 37919 - DNA, 41 bp, Homo Sapiens; identical to SEQ ID NO: 17828

SEQ ID NO: 37920 - DNA, 42 bp, Homo Sapiens
gctttgcacgtatgaggccccgggttcaatccccggcatctc

SEQ ID NO: 37921 - DNA, 42 bp, Homo Sapiens; identical to SEQ ID NO: 17863

SEQ ID NO: 37922 - DNA, 43 bp, Homo Sapiens; identical to SEQ ID NO: 17864

SEQ ID NO: 37923 - DNA, 16 bp, Homo Sapiens
ggaagcgtgctgggcc

SEQ ID NO: 37924 - DNA, 17 bp, Homo Sapiens
ggaagcgtgctgggccc

SEQ ID NO: 37925 - DNA, 18 bp, Homo Sapiens
ggaagcgtgctgggccca

SEQ ID NO: 37926 - DNA, 23 bp, Homo Sapiens
ggaagcgtgctgggcccataacc

SEQ ID NO: 37927 - DNA, 24 bp, Homo Sapiens
ggaagcgtgctgggcccataaccc

SEQ ID NO: 37928 - DNA, 26 bp, Homo Sapiens
ggaagcgtgctgggcccataacccag

SEQ ID NO: 37929 - DNA, 27 bp, Homo Sapiens
ggaagcgtgctgggcccataacccaga

SEQ ID NO: 37930 - DNA, 37 bp, Homo Sapiens; identical to SEQ ID NO: 17881

SEQ ID NO: 37931 - DNA, 38 bp, Homo Sapiens; identical to SEQ ID NO: 17882

SEQ ID NO: 37932 - DNA, 40 bp, Homo Sapiens; identical to SEQ ID NO: 17884

SEQ ID NO: 37933 - DNA, 16 bp, Homo Sapiens
ggactctgaatccagc

SEQ ID NO: 37934 - DNA, 24 bp, Homo Sapiens
ggactctgaatccagcgatccgag

SEQ ID NO: 37935 - DNA, 25 bp, Homo Sapiens
ggagaccggggttcaattccccgac

SEQ ID NO: 37936 - DNA, 31 bp, Homo Sapiens; identical to SEQ ID NO: 17909

SEQ ID NO: 37937 - DNA, 32 bp, Homo Sapiens; identical to SEQ ID NO: 17910

SEQ ID NO: 37938 - DNA, 33 bp, Homo Sapiens; identical to SEQ ID NO: 17911

SEQ ID NO: 37939 - DNA, 26 bp, Homo Sapiens
ggagaccggggttcgattccccgacg

SEQ ID NO: 37940 - DNA, 28 bp, Homo Sapiens
ggagaccggggttcgattccccgacggg

SEQ ID NO: 37941 - DNA, 29 bp, Homo Sapiens
ggagaccggggttcgattccccgacgggg

SEQ ID NO: 37942 - DNA, 30 bp, Homo Sapiens; identical to SEQ ID NO: 17919

SEQ ID NO: 37943 - DNA, 31 bp, Homo Sapiens; identical to SEQ ID NO: 17920

SEQ ID NO: 37944 - DNA, 32 bp, Homo Sapiens; identical to SEQ ID NO: 17921

SEQ ID NO: 37945 - DNA, 33 bp, Homo Sapiens; identical to SEQ ID NO: 17922

SEQ ID NO: 37946 - DNA, 34 bp, Homo Sapiens; identical to SEQ ID NO: 17923

SEQ ID NO: 37947 - DNA, 17 bp, Homo Sapiens
ggagagcattagactga

SEQ ID NO: 37948 - DNA, 17 bp, Homo Sapiens
ggagagcgttagactga

SEQ ID NO: 37949 - DNA, 16 bp, Homo Sapiens
ggagatcctgggttcg

SEQ ID NO: 37950 - DNA, 32 bp, Homo Sapiens; identical to SEQ ID NO: 17928

SEQ ID NO: 37951 - DNA, 34 bp, Homo Sapiens
ggagatcctgggttcgaatcccagcggggcctcc

SEQ ID NO: 37952 - DNA, 32 bp, Homo Sapiens; identical to SEQ ID NO: 17932

SEQ ID NO: 37953 - DNA, 34 bp, Homo Sapiens; identical to SEQ ID NO: 17934

SEQ ID NO: 37954 - DNA, 26 bp, Homo Sapiens
ggagatgaaaacctttttccaaggac

SEQ ID NO: 37955 - DNA, 27 bp, Homo Sapiens
ggagatgaaaacctttttccaaggaca

SEQ ID NO: 37956 - DNA, 28 bp, Homo Sapiens
ggagatgaaaacctttttccaaggacac

SEQ ID NO: 37957 - DNA, 29 bp, Homo Sapiens
ggagatgaaaacctttttccaaggacacc

SEQ ID NO: 37958 - DNA, 30 bp, Homo Sapiens; identical to SEQ ID NO: 17942

SEQ ID NO: 37959 - DNA, 29 bp, Homo Sapiens
ggagatttcaacttaacttgaccgctctg

SEQ ID NO: 37960 - DNA, 31 bp, Homo Sapiens; identical to SEQ ID NO: 17957

SEQ ID NO: 37961 - DNA, 32 bp, Homo Sapiens; identical to SEQ ID NO: 17958

SEQ ID NO: 37962 - DNA, 33 bp, Homo Sapiens; identical to SEQ ID NO: 17959

SEQ ID NO: 37963 - DNA, 18 bp, Homo Sapiens
ggagctggggattgtggg

SEQ ID NO: 37964 - DNA, 19 bp, Homo Sapiens
ggagctggggattgtgggt

SEQ ID NO: 37965 - DNA, 21 bp, Homo Sapiens
ggagctggggattgtgggttc

SEQ ID NO: 37966 - DNA, 22 bp, Homo Sapiens
ggagctggggattgtgggttcg

SEQ ID NO: 37967 - DNA, 28 bp, Homo Sapiens
ggagctggggattgtgggttcgagtccc

SEQ ID NO: 37968 - DNA, 29 bp, Homo Sapiens
ggagctggggattgtgggttcgagtccca

SEQ ID NO: 37969 - DNA, 40 bp, Homo Sapiens; identical to SEQ ID NO: 17963

SEQ ID NO: 37970 - DNA, 41 bp, Homo Sapiens; identical to SEQ ID NO: 17964

SEQ ID NO: 37971 - DNA, 33 bp, Homo Sapiens
ggaggcgtgggttcgaatcccactcctgacacc

SEQ ID NO: 37972 - DNA, 33 bp, Homo Sapiens; identical to SEQ ID NO: 17979

SEQ ID NO: 37973 - DNA, 22 bp, Homo Sapiens
ggagtggttatcacgttcgcct

SEQ ID NO: 37974 - DNA, 24 bp, Homo Sapiens
ggagttaaagactttttctctgac

SEQ ID NO: 37975 - DNA, 25 bp, Homo Sapiens
ggagttaaagactttttctctgacc

SEQ ID NO: 37976 - DNA, 26 bp, Homo Sapiens
ggagttaaagactttttctctgacca

SEQ ID NO: 37977 - DNA, 22 bp, Homo Sapiens
ggataacagctatccattggtc

SEQ ID NO: 37978 - DNA, 23 bp, Homo Sapiens
ggataacagctatccattggtct

SEQ ID NO: 37979 - DNA, 17 bp, Homo Sapiens
ggataacgcgtctgact

SEQ ID NO: 37980 - DNA, 34 bp, Homo Sapiens; identical to SEQ ID NO: 18002

SEQ ID NO: 37981 - DNA, 17 bp, Homo Sapiens
ggataaggcgtctgact

SEQ ID NO: 37982 - DNA, 16 bp, Homo Sapiens
ggatagcgcattggac

SEQ ID NO: 37983 - DNA, 18 bp, Homo Sapiens
ggatagctcagtcggtag

SEQ ID NO: 37984 - DNA, 19 bp, Homo Sapiens
ggatagctcagtcggtaga

SEQ ID NO: 37985 - DNA, 20 bp, Homo Sapiens
ggatagctcagtcggtagag

SEQ ID NO: 37986 - DNA, 24 bp, Homo Sapiens
ggatagctcagtcggtagagcatc

SEQ ID NO: 37987 - DNA, 28 bp, Homo Sapiens
ggatagctcagtcggtagagcatcagac

SEQ ID NO: 37988 - DNA, 18 bp, Homo Sapiens
ggatcagaagattccagg

SEQ ID NO: 37989 - DNA, 21 bp, Homo Sapiens
ggatcagaagattctaggttc

SEQ ID NO: 37990 - DNA, 22 bp, Homo Sapiens
ggatcagaagattctaggttcg

SEQ ID NO: 37991 - DNA, 40 bp, Homo Sapiens; identical to SEQ ID NO: 18035

SEQ ID NO: 37992 - DNA, 41 bp, Homo Sapiens; identical to SEQ ID NO: 18036

SEQ ID NO: 37993 - DNA, 19 bp, Homo Sapiens
ggatcagaagattgagggt

SEQ ID NO: 37994 - DNA, 20 bp, Homo Sapiens
ggatcagaagattgagggtt

SEQ ID NO: 37995 - DNA, 29 bp, Homo Sapiens
ggatcagaagattgcaggttcgagtcctg

SEQ ID NO: 37996 - DNA, 17 bp, Homo Sapiens
ggatggaggcgtgggtt

SEQ ID NO: 37997 - DNA, 36 bp, Homo Sapiens
ggatggaggcgtgggttcgaatcccacttctgacac

SEQ ID NO: 37998 - DNA, 37 bp, Homo Sapiens; identical to SEQ ID NO: 18053

SEQ ID NO: 37999 - DNA, 18 bp, Homo Sapiens
ggatggccgagcggtcta

SEQ ID NO: 38000 - DNA, 22 bp, Homo Sapiens
ggatggccgagcggtctaaggc

SEQ ID NO: 38001 - DNA, 28 bp, Homo Sapiens
ggatggggtgtgataggtggcacggaga

SEQ ID NO: 38002 - DNA, 29 bp, Homo Sapiens
ggatggggtgtgataggtggcacggagaa

SEQ ID NO: 38003 - DNA, 34 bp, Homo Sapiens; identical to SEQ ID NO: 18078

SEQ ID NO: 38004 - DNA, 16 bp, Homo Sapiens
ggatgtagctcagtgg

SEQ ID NO: 38005 - DNA, 17 bp, Homo Sapiens
ggatgtagctcagtggt

SEQ ID NO: 38006 - DNA, 21 bp, Homo Sapiens
ggatgtagctcagtggtagag

SEQ ID NO: 38007 - DNA, 16 bp, Homo Sapiens
ggattcggcgctctca

SEQ ID NO: 38008 - DNA, 18 bp, Homo Sapiens
ggattcggcgctctcacc

SEQ ID NO: 38009 - DNA, 21 bp, Homo Sapiens
ggattcggcgctctcaccgcc

SEQ ID NO: 38010 - DNA, 28 bp, Homo Sapiens
ggattcggcgctctcaccgccgcggccc

SEQ ID NO: 38011 - DNA, 33 bp, Homo Sapiens; identical to SEQ ID NO: 18103

SEQ ID NO: 38012 - DNA, 34 bp, Homo Sapiens; identical to SEQ ID NO: 18104

SEQ ID NO: 38013 - DNA, 23 bp, Homo Sapiens
ggattgtgggttcgagtcccatc

SEQ ID NO: 38014 - DNA, 31 bp, Homo Sapiens; identical to SEQ ID NO: 18115

SEQ ID NO: 38015 - DNA, 32 bp, Homo Sapiens; identical to SEQ ID NO: 18116

SEQ ID NO: 38016 - DNA, 18 bp, Homo Sapiens
ggatttgtggtccagtgg

SEQ ID NO: 38017 - DNA, 16 bp, Homo Sapiens
ggcagagcatttgact

SEQ ID NO: 38018 - DNA, 19 bp, Homo Sapiens
ggcagcgatggccgagtgg

SEQ ID NO: 38019 - DNA, 20 bp, Homo Sapiens
ggcatcagcctccggagctg

SEQ ID NO: 38020 - DNA, 27 bp, Homo Sapiens
ggcatcagcctccggagctggggattg

SEQ ID NO: 38021 - DNA, 28 bp, Homo Sapiens
ggcatcagcctccggagctggggattgt

SEQ ID NO: 38022 - DNA, 33 bp, Homo Sapiens; identical to SEQ ID NO: 18137

SEQ ID NO: 38023 - DNA, 19 bp, Homo Sapiens
ggcattggcctcctaagcc

SEQ ID NO: 38024 - DNA, 16 bp, Homo Sapiens
ggcattggtggttcag

SEQ ID NO: 38025 - DNA, 19 bp, Homo Sapiens
ggcattggtggttcagtgg

SEQ ID NO: 38026 - DNA, 31 bp, Homo Sapiens
ggcattggtggttcagtggtagaattctcgc

SEQ ID NO: 38027 - DNA, 32 bp, Homo Sapiens; identical to SEQ ID NO: 18142

SEQ ID NO: 38028 - DNA, 33 bp, Homo Sapiens; identical to SEQ ID NO: 18143

SEQ ID NO: 38029 - DNA, 26 bp, Homo Sapiens
ggcccataacccagaggtcgatggat

SEQ ID NO: 38030 - DNA, 33 bp, Homo Sapiens; identical to SEQ ID NO: 18183

SEQ ID NO: 38031 - DNA, 35 bp, Homo Sapiens; identical to SEQ ID NO: 18185

SEQ ID NO: 38032 - DNA, 32 bp, Homo Sapiens; identical to SEQ ID NO: 18195

SEQ ID NO: 38033 - DNA, 33 bp, Homo Sapiens; identical to SEQ ID NO: 18196

SEQ ID NO: 38034 - DNA, 35 bp, Homo Sapiens; identical to SEQ ID NO: 18198

SEQ ID NO: 38035 - DNA, 36 bp, Homo Sapiens; identical to SEQ ID NO: 18199

SEQ ID NO: 38036 - DNA, 37 bp, Homo Sapiens; identical to SEQ ID NO: 18200

SEQ ID NO: 38037 - DNA, 40 bp, Homo Sapiens; identical to SEQ ID NO: 18201

SEQ ID NO: 38038 - DNA, 41 bp, Homo Sapiens; identical to SEQ ID NO: 18202

SEQ ID NO: 38039 - DNA, 31 bp, Homo Sapiens
ggccccgggttcaatccccggcacctccacc

SEQ ID NO: 38040 - DNA, 31 bp, Homo Sapiens
ggccccgggttcgatccccggcatctccacc

SEQ ID NO: 38041 - DNA, 18 bp, Homo Sapiens
ggcccgggttcgactccc

SEQ ID NO: 38042 - DNA, 28 bp, Homo Sapiens
ggcccgggttcgactcccggtatgggaa

SEQ ID NO: 38043 - DNA, 29 bp, Homo Sapiens
ggcccgggttcgactcccggtatgggaac

SEQ ID NO: 38044 - DNA, 26 bp, Homo Sapiens
ggcccgggttcgactcccggtgtggg

SEQ ID NO: 38045 - DNA, 27 bp, Homo Sapiens
ggcccgggttcgactcccggtgtggga

SEQ ID NO: 38046 - DNA, 28 bp, Homo Sapiens
ggcccgggttcgactcccggtgtgggaa

SEQ ID NO: 38047 - DNA, 29 bp, Homo Sapiens
ggcccgggttcgactcccggtgtgggaac

SEQ ID NO: 38048 - DNA, 30 bp, Homo Sapiens; identical to SEQ ID NO: 18208

SEQ ID NO: 38049 - DNA, 28 bp, Homo Sapiens
ggcccgggttcgattcccggtcagggaa

SEQ ID NO: 38050 - DNA, 29 bp, Homo Sapiens
ggcccgggttcgattcccggtcagggaac

SEQ ID NO: 38051 - DNA, 31 bp, Homo Sapiens; identical to SEQ ID NO: 18219

SEQ ID NO: 38052 - DNA, 33 bp, Homo Sapiens; identical to SEQ ID NO: 18221

SEQ ID NO: 38053 - DNA, 35 bp, Homo Sapiens; identical to SEQ ID NO: 18223

SEQ ID NO: 38054 - DNA, 18 bp, Homo Sapiens
ggccgagcggtctaaggc

SEQ ID NO: 38055 - DNA, 22 bp, Homo Sapiens
ggccgagcggtctaaggcgctg

SEQ ID NO: 38056 - DNA, 21 bp, Homo Sapiens
ggccgcagcaacctcggttcg

SEQ ID NO: 38057 - DNA, 38 bp, Homo Sapiens
ggccgcagcaacctcggttcgaatccgagtcacggcac

SEQ ID NO: 38058 - DNA, 39 bp, Homo Sapiens; identical to SEQ ID NO: 18236

SEQ ID NO: 38059 - DNA, 18 bp, Homo Sapiens
ggccgcgtggcctaatgg

SEQ ID NO: 38060 - DNA, 19 bp, Homo Sapiens
ggccgcgtggcctaatgga

SEQ ID NO: 38061 - DNA, 25 bp, Homo Sapiens
ggccgcgtggcctaatggataaggc

SEQ ID NO: 38062 - DNA, 29 bp, Homo Sapiens
ggccgcgtggcctaatggataaggcgtct

SEQ ID NO: 38063 - DNA, 30 bp, Homo Sapiens; identical to SEQ ID NO: 18240

SEQ ID NO: 38064 - DNA, 33 bp, Homo Sapiens; identical to SEQ ID NO: 18241

SEQ ID NO: 38065 - DNA, 32 bp, Homo Sapiens; identical to SEQ ID NO: 18243

SEQ ID NO: 38066 - DNA, 33 bp, Homo Sapiens; identical to SEQ ID NO: 18244

SEQ ID NO: 38067 - DNA, 16 bp, Homo Sapiens
ggccggttagctcagt

SEQ ID NO: 38068 - DNA, 20 bp, Homo Sapiens
ggccggttagctcagtcggc

SEQ ID NO: 38069 - DNA, 18 bp, Homo Sapiens
ggccggttagctcagttg

SEQ ID NO: 38070 - DNA, 19 bp, Homo Sapiens
ggccggttagctcagttgg

SEQ ID NO: 38071 - DNA, 20 bp, Homo Sapiens
ggccggttagctcagttggt

SEQ ID NO: 38072 - DNA, 26 bp, Homo Sapiens
ggccggttagctcagttggttagagc

SEQ ID NO: 38073 - DNA, 16 bp, Homo Sapiens
ggccgtgatcgtatag

SEQ ID NO: 38074 - DNA, 17 bp, Homo Sapiens
ggccgtgatcgtatagt

SEQ ID NO: 38075 - DNA, 18 bp, Homo Sapiens
ggccgtgatcgtatagtg

SEQ ID NO: 38076 - DNA, 19 bp, Homo Sapiens
ggccgtgatcgtatagtgg

SEQ ID NO: 38077 - DNA, 20 bp, Homo Sapiens
ggccgtgatcgtatagtggt

SEQ ID NO: 38078 - DNA, 21 bp, Homo Sapiens
ggccgtgatcgtatagtggtt

SEQ ID NO: 38079 - DNA, 22 bp, Homo Sapiens
ggccgtgatcgtatagtggtta

SEQ ID NO: 38080 - DNA, 23 bp, Homo Sapiens
ggccgtgatcgtatagtggttag

SEQ ID NO: 38081 - DNA, 24 bp, Homo Sapiens
ggccgtgatcgtatagtggttagt

SEQ ID NO: 38082 - DNA, 25 bp, Homo Sapiens
ggccgtgatcgtatagtggttagta

SEQ ID NO: 38083 - DNA, 26 bp, Homo Sapiens
ggccgtgatcgtatagtggttagtac

SEQ ID NO: 38084 - DNA, 27 bp, Homo Sapiens
ggccgtgatcgtatagtggttagtact

SEQ ID NO: 38085 - DNA, 28 bp, Homo Sapiens
ggccgtgatcgtatagtggttagtactc

SEQ ID NO: 38086 - DNA, 29 bp, Homo Sapiens
ggccgtgatcgtatagtggttagtactct

SEQ ID NO: 38087 - DNA, 30 bp, Homo Sapiens; identical to SEQ ID NO: 18279

SEQ ID NO: 38088 - DNA, 31 bp, Homo Sapiens; identical to SEQ ID NO: 18280

SEQ ID NO: 38089 - DNA, 32 bp, Homo Sapiens; identical to SEQ ID NO: 18281

SEQ ID NO: 38090 - DNA, 33 bp, Homo Sapiens; identical to SEQ ID NO: 18282

SEQ ID NO: 38091 - DNA, 34 bp, Homo Sapiens; identical to SEQ ID NO: 18283

SEQ ID NO: 38092 - DNA, 35 bp, Homo Sapiens; identical to SEQ ID NO: 18284

SEQ ID NO: 38093 - DNA, 36 bp, Homo Sapiens; identical to SEQ ID NO: 18285

SEQ ID NO: 38094 - DNA, 37 bp, Homo Sapiens; identical to SEQ ID NO: 18286

SEQ ID NO: 38095 - DNA, 17 bp, Homo Sapiens
ggcctcgtggcgcaacg

SEQ ID NO: 38096 - DNA, 18 bp, Homo Sapiens
ggcctcgtggcgcaacgg

SEQ ID NO: 38097 - DNA, 31 bp, Homo Sapiens; identical to SEQ ID NO: 18293

SEQ ID NO: 38098 - DNA, 32 bp, Homo Sapiens; identical to SEQ ID NO: 18294

SEQ ID NO: 38099 - DNA, 33 bp, Homo Sapiens; identical to SEQ ID NO: 18295

SEQ ID NO: 38100 - DNA, 23 bp, Homo Sapiens
ggcgcagcggaagcgtgctgggc

SEQ ID NO: 38101 - DNA, 19 bp, Homo Sapiens
ggcgccgtggcttagttgg

SEQ ID NO: 38102 - DNA, 19 bp, Homo Sapiens
ggcgcggtggccaagtggt

SEQ ID NO: 38103 - DNA, 24 bp, Homo Sapiens
ggcgcggtggccaagtggtaaggc

SEQ ID NO: 38104 - DNA, 45 bp, Homo Sapiens
ggcgctctcaccgccgcggcccgggttcgattcccggtcagggaa

SEQ ID NO: 38105 - DNA, 46 bp, Homo Sapiens; identical to SEQ ID NO: 18316

SEQ ID NO: 38106 - DNA, 20 bp, Homo Sapiens
ggcggcccgggttcgactcc

SEQ ID NO: 38107 - DNA, 29 bp, Homo Sapiens
ggcggcccgggttcgactcccggtgtggg

SEQ ID NO: 38108 - DNA, 30 bp, Homo Sapiens; identical to SEQ ID NO: 18326

SEQ ID NO: 38109 - DNA, 31 bp, Homo Sapiens; identical to SEQ ID NO: 18327

SEQ ID NO: 38110 - DNA, 32 bp, Homo Sapiens; identical to SEQ ID NO: 18328

SEQ ID NO: 38111 - DNA, 33 bp, Homo Sapiens; identical to SEQ ID NO: 18329

SEQ ID NO: 38112 - DNA, 18 bp, Homo Sapiens
ggctagctcagtcggtag

SEQ ID NO: 38113 - DNA, 19 bp, Homo Sapiens
ggctagctcagtcggtaga

SEQ ID NO: 38114 - DNA, 20 bp, Homo Sapiens
ggctagctcagtcggtagag

SEQ ID NO: 38115 - DNA, 21 bp, Homo Sapiens
ggctagctcagtcggtagagc

SEQ ID NO: 38116 - DNA, 22 bp, Homo Sapiens
ggctagctcagtcggtagagca

SEQ ID NO: 38117 - DNA, 28 bp, Homo Sapiens
ggctagctcagtcggtagagcatgagac

SEQ ID NO: 38118 - DNA, 29 bp, Homo Sapiens
ggctagctcagtcggtagagcatgagact

SEQ ID NO: 38119 - DNA, 30 bp, Homo Sapiens; identical to SEQ ID NO: 18355

SEQ ID NO: 38120 - DNA, 31 bp, Homo Sapiens; identical to SEQ ID NO: 18356

SEQ ID NO: 38121 - DNA, 45 bp, Homo Sapiens
ggctagctcagtcggtagagcatgagactcttaatctcagggtcg

SEQ ID NO: 38122 - DNA, 28 bp, Homo Sapiens
ggctagctcagtcggtagagcatgggac

SEQ ID NO: 38123 - DNA, 29 bp, Homo Sapiens
ggctagctcagtcggtagagcatgggact

SEQ ID NO: 38124 - DNA, 30 bp, Homo Sapiens; identical to SEQ ID NO: 18370

SEQ ID NO: 38125 - DNA, 31 bp, Homo Sapiens; identical to SEQ ID NO: 18371

SEQ ID NO: 38126 - DNA, 32 bp, Homo Sapiens; identical to SEQ ID NO: 18372

SEQ ID NO: 38127 - DNA, 45 bp, Homo Sapiens
ggctagctcagtcggtagagcatgggactcttaatcccagggtcg

SEQ ID NO: 38128 - DNA, 24 bp, Homo Sapiens
ggctcacatcaccccataaacacc

SEQ ID NO: 38129 - DNA, 25 bp, Homo Sapiens
ggctcacatcaccccataaacacca

SEQ ID NO: 38130 - DNA, 27 bp, Homo Sapiens
ggctccagtctcttcgggggcgtgggt

SEQ ID NO: 38131 - DNA, 47 bp, Homo Sapiens
ggctccagtctcttcgggggcgtgggttcgaatcccaccgctgccac

SEQ ID NO: 38132 - DNA, 16 bp, Homo Sapiens
ggctccatagctcagg

SEQ ID NO: 38133 - DNA, 17 bp, Homo Sapiens
ggctccatagctcaggg

SEQ ID NO: 38134 - DNA, 18 bp, Homo Sapiens
ggctccatagctcagggg

SEQ ID NO: 38135 - DNA, 19 bp, Homo Sapiens
ggctccatagctcaggggt

SEQ ID NO: 38136 - DNA, 32 bp, Homo Sapiens; identical to SEQ ID NO: 18410

SEQ ID NO: 38137 - DNA, 33 bp, Homo Sapiens; identical to SEQ ID NO: 18411

SEQ ID NO: 38138 - DNA, 19 bp, Homo Sapiens
ggctccatagctcagtggt

SEQ ID NO: 38139 - DNA, 18 bp, Homo Sapiens
ggctccgtggcgcaatgg

SEQ ID NO: 38140 - DNA, 19 bp, Homo Sapiens
ggctccgtggcgcaatgga

SEQ ID NO: 38141 - DNA, 20 bp, Homo Sapiens
ggctccgtggcgcaatggat

SEQ ID NO: 38142 - DNA, 22 bp, Homo Sapiens
ggctccgtggcgcaatggatag

SEQ ID NO: 38143 - DNA, 27 bp, Homo Sapiens
ggctccgtggcgcaatggatagcgcat

SEQ ID NO: 38144 - DNA, 32 bp, Homo Sapiens; identical to SEQ ID NO: 18427

SEQ ID NO: 38145 - DNA, 33 bp, Homo Sapiens; identical to SEQ ID NO: 18428

SEQ ID NO: 38146 - DNA, 16 bp, Homo Sapiens
ggctcgttggtctagg

SEQ ID NO: 38147 - DNA, 17 bp, Homo Sapiens
ggctcgttggtctaggg

SEQ ID NO: 38148 - DNA, 18 bp, Homo Sapiens
ggctcgttggtctagggg

SEQ ID NO: 38149 - DNA, 19 bp, Homo Sapiens
ggctcgttggtctaggggt

SEQ ID NO: 38150 - DNA, 20 bp, Homo Sapiens
ggctcgttggtctaggggta

SEQ ID NO: 38151 - DNA, 22 bp, Homo Sapiens
ggctcgttggtctaggggtatg

SEQ ID NO: 38152 - DNA, 25 bp, Homo Sapiens
ggctcgttggtctaggggtatgatt

SEQ ID NO: 38153 - DNA, 26 bp, Homo Sapiens
ggctcgttggtctaggggtatgattc

SEQ ID NO: 38154 - DNA, 27 bp, Homo Sapiens
ggctcgttggtctaggggtatgattct

SEQ ID NO: 38155 - DNA, 28 bp, Homo Sapiens
ggctcgttggtctaggggtatgattctc

SEQ ID NO: 38156 - DNA, 29 bp, Homo Sapiens
ggctcgttggtctaggggtatgattctcg

SEQ ID NO: 38157 - DNA, 30 bp, Homo Sapiens; identical to SEQ ID NO: 18447

SEQ ID NO: 38158 - DNA, 31 bp, Homo Sapiens; identical to SEQ ID NO: 18448

SEQ ID NO: 38159 - DNA, 32 bp, Homo Sapiens; identical to SEQ ID NO: 18449

SEQ ID NO: 38160 - DNA, 33 bp, Homo Sapiens; identical to SEQ ID NO: 18450

SEQ ID NO: 38161 - DNA, 34 bp, Homo Sapiens; identical to SEQ ID NO: 18451

SEQ ID NO: 38162 - DNA, 35 bp, Homo Sapiens; identical to SEQ ID NO: 18452

SEQ ID NO: 38163 - DNA, 33 bp, Homo Sapiens; identical to SEQ ID NO: 18454

SEQ ID NO: 38164 - DNA, 34 bp, Homo Sapiens; identical to SEQ ID NO: 18455

SEQ ID NO: 38165 - DNA, 35 bp, Homo Sapiens; identical to SEQ ID NO: 18456

SEQ ID NO: 38166 - DNA, 30 bp, Homo Sapiens
ggctcgttggtctaggggtatgattctcgg

SEQ ID NO: 38167 - DNA, 31 bp, Homo Sapiens; identical to SEQ ID NO: 18458

SEQ ID NO: 38168 - DNA, 32 bp, Homo Sapiens; identical to SEQ ID NO: 18459

SEQ ID NO: 38169 - DNA, 33 bp, Homo Sapiens; identical to SEQ ID NO: 18460

SEQ ID NO: 38170 - DNA, 34 bp, Homo Sapiens; identical to SEQ ID NO: 18461

SEQ ID NO: 38171 - DNA, 35 bp, Homo Sapiens; identical to SEQ ID NO: 18462

SEQ ID NO: 38172 - DNA, 31 bp, Homo Sapiens; identical to SEQ ID NO: 18467

SEQ ID NO: 38173 - DNA, 32 bp, Homo Sapiens; identical to SEQ ID NO: 18468

SEQ ID NO: 38174 - DNA, 19 bp, Homo Sapiens
ggctctgtggcgcaatgga

SEQ ID NO: 38175 - DNA, 20 bp, Homo Sapiens
ggctctgtggcgcaatggat

SEQ ID NO: 38176 - DNA, 27 bp, Homo Sapiens
ggctctgtggcgcaatggatagcgcat

SEQ ID NO: 38177 - DNA, 32 bp, Homo Sapiens; identical to SEQ ID NO: 18474

SEQ ID NO: 38178 - DNA, 33 bp, Homo Sapiens; identical to SEQ ID NO: 18475

SEQ ID NO: 38179 - DNA, 20 bp, Homo Sapiens
ggctctgtggcttagttggc

SEQ ID NO: 38180 - DNA, 20 bp, Homo Sapiens
ggctgagtgaagcattggac

SEQ ID NO: 38181 - DNA, 32 bp, Homo Sapiens
ggctgtatagctcagtggtagagcatttgact

SEQ ID NO: 38182 - DNA, 25 bp, Homo Sapiens
ggctgtgatggccgagtggttaagg

SEQ ID NO: 38183 - DNA, 26 bp, Homo Sapiens
ggctgtgatggccgagtggttaaggc

SEQ ID NO: 38184 - DNA, 24 bp, Homo Sapiens
ggctgttaaccgaaaggttggtgg

SEQ ID NO: 38185 - DNA, 26 bp, Homo Sapiens
ggctgttaaccgaaaggttggtggtt

SEQ ID NO: 38186 - DNA, 26 bp, Homo Sapiens
gggagaccggggttcaattccccgac

SEQ ID NO: 38187 - DNA, 30 bp, Homo Sapiens; identical to SEQ ID NO: 18507

SEQ ID NO: 38188 - DNA, 31 bp, Homo Sapiens; identical to SEQ ID NO: 18508

SEQ ID NO: 38189 - DNA, 32 bp, Homo Sapiens; identical to SEQ ID NO: 18509

SEQ ID NO: 38190 - DNA, 33 bp, Homo Sapiens; identical to SEQ ID NO: 18510

SEQ ID NO: 38191 - DNA, 34 bp, Homo Sapiens; identical to SEQ ID NO: 18511

SEQ ID NO: 38192 - DNA, 35 bp, Homo Sapiens; identical to SEQ ID NO: 18512

SEQ ID NO: 38193 - DNA, 16 bp, Homo Sapiens
gggagaccggggttcg

SEQ ID NO: 38194 - DNA, 33 bp, Homo Sapiens
gggagaccggggttcgattccccaacggggagc

SEQ ID NO: 38195 - DNA, 26 bp, Homo Sapiens
gggagaccggggttcgattccccgac

SEQ ID NO: 38196 - DNA, 27 bp, Homo Sapiens
gggagaccggggttcgattccccgacg

SEQ ID NO: 38197 - DNA, 29 bp, Homo Sapiens
gggagaccggggttcgattccccgacggg

SEQ ID NO: 38198 - DNA, 30 bp, Homo Sapiens; identical to SEQ ID NO: 18519

SEQ ID NO: 38199 - DNA, 31 bp, Homo Sapiens; identical to SEQ ID NO: 18520

SEQ ID NO: 38200 - DNA, 32 bp, Homo Sapiens; identical to SEQ ID NO: 18521

SEQ ID NO: 38201 - DNA, 33 bp, Homo Sapiens; identical to SEQ ID NO: 18522

SEQ ID NO: 38202 - DNA, 34 bp, Homo Sapiens; identical to SEQ ID NO: 18523

SEQ ID NO: 38203 - DNA, 35 bp, Homo Sapiens; identical to SEQ ID NO: 18524

SEQ ID NO: 38204 - DNA, 16 bp, Homo Sapiens
gggagagcattagact

SEQ ID NO: 38205 - DNA, 18 bp, Homo Sapiens
gggagagcattagactga

SEQ ID NO: 38206 - DNA, 16 bp, Homo Sapiens
gggagagcgttagact

SEQ ID NO: 38207 - DNA, 16 bp, Homo Sapiens
gggaggcccgggttcg

SEQ ID NO: 38208 - DNA, 25 bp, Homo Sapiens
gggaggcccgggttcgattcccggc

SEQ ID NO: 38209 - DNA, 32 bp, Homo Sapiens
gggaggcccgggttcgattcccggccaatgca

SEQ ID NO: 38210 - DNA, 33 bp, Homo Sapiens; identical to SEQ ID NO: 18529

SEQ ID NO: 38211 - DNA, 16 bp, Homo Sapiens
gggatgggttcgattc

SEQ ID NO: 38212 - DNA, 16 bp, Homo Sapiens
gggatgtagctcagtg

SEQ ID NO: 38213 - DNA, 17 bp, Homo Sapiens
gggatgtagctcagtgg

SEQ ID NO: 38214 - DNA, 18 bp, Homo Sapiens
gggatgtagctcagtggt

SEQ ID NO: 38215 - DNA, 19 bp, Homo Sapiens
gggatgtagctcagtggta

SEQ ID NO: 38216 - DNA, 20 bp, Homo Sapiens
gggatgtagctcagtggtag

SEQ ID NO: 38217 - DNA, 21 bp, Homo Sapiens
gggatgtagctcagtggtaga

SEQ ID NO: 38218 - DNA, 22 bp, Homo Sapiens
gggatgtagctcagtggtagag

SEQ ID NO: 38219 - DNA, 25 bp, Homo Sapiens
gggatgtagctcagtggtagagcgc

SEQ ID NO: 38220 - DNA, 19 bp, Homo Sapiens
gggattgtgggttcgagtc

SEQ ID NO: 38221 - DNA, 20 bp, Homo Sapiens
gggattgtgggttcgagtcc

SEQ ID NO: 38222 - DNA, 21 bp, Homo Sapiens
gggattgtgggttcgagtccc

SEQ ID NO: 38223 - DNA, 22 bp, Homo Sapiens
gggattgtgggttcgagtccca

SEQ ID NO: 38224 - DNA, 24 bp, Homo Sapiens
gggattgtgggttcgagtcccacc

SEQ ID NO: 38225 - DNA, 28 bp, Homo Sapiens
gggattgtgggttcgagtcccacccggg

SEQ ID NO: 38226 - DNA, 29 bp, Homo Sapiens
gggattgtgggttcgagtcccacccgggg

SEQ ID NO: 38227 - DNA, 30 bp, Homo Sapiens; identical to SEQ ID NO: 18559

SEQ ID NO: 38228 - DNA, 31 bp, Homo Sapiens; identical to SEQ ID NO: 18560

SEQ ID NO: 38229 - DNA, 31 bp, Homo Sapiens; identical to SEQ ID NO: 18561

SEQ ID NO: 38230 - DNA, 24 bp, Homo Sapiens
gggattgtgggttcgagtcccatc

SEQ ID NO: 38231 - DNA, 26 bp, Homo Sapiens
gggattgtgggttcgagtcccatctg

SEQ ID NO: 38232 - DNA, 31 bp, Homo Sapiens; identical to SEQ ID NO: 18565

SEQ ID NO: 38233 - DNA, 32 bp, Homo Sapiens; identical to SEQ ID NO: 18566

SEQ ID NO: 38234 - DNA, 33 bp, Homo Sapiens; identical to SEQ ID NO: 18567

SEQ ID NO: 38235 - DNA, 34 bp, Homo Sapiens; identical to SEQ ID NO: 18568

SEQ ID NO: 38236 - DNA, 30 bp, Homo Sapiens
gggattgtgggttcgagtcccatctgggtc

SEQ ID NO: 38237 - DNA, 32 bp, Homo Sapiens; identical to SEQ ID NO: 18569

SEQ ID NO: 38238 - DNA, 33 bp, Homo Sapiens; identical to SEQ ID NO: 18570

SEQ ID NO: 38239 - DNA, 34 bp, Homo Sapiens; identical to SEQ ID NO: 18571

SEQ ID NO: 38240 - DNA, 18 bp, Homo Sapiens
gggccagtggcgcaatgg

SEQ ID NO: 38241 - DNA, 19 bp, Homo Sapiens
gggccagtggcgcaatgga

SEQ ID NO: 38242 - DNA, 20 bp, Homo Sapiens
gggccagtggcgcaatggat

SEQ ID NO: 38243 - DNA, 23 bp, Homo Sapiens
gggccagtggcgcaatggataac

SEQ ID NO: 38244 - DNA, 24 bp, Homo Sapiens
gggccagtggcgcaatggataacg

SEQ ID NO: 38245 - DNA, 25 bp, Homo Sapiens
gggccagtggcgcaatggataacgc

SEQ ID NO: 38246 - DNA, 32 bp, Homo Sapiens; identical to SEQ ID NO: 18578

SEQ ID NO: 38247 - DNA, 33 bp, Homo Sapiens; identical to SEQ ID NO: 18579

SEQ ID NO: 38248 - DNA, 17 bp, Homo Sapiens
gggcccataccccgaaa

SEQ ID NO: 38249 - DNA, 18 bp, Homo Sapiens
gggcccataccccgaaaa

SEQ ID NO: 38250 - DNA, 26 bp, Homo Sapiens
gggcccataccccgaaaatgttggtt

SEQ ID NO: 38251 - DNA, 46 bp, Homo Sapiens; identical to SEQ ID NO: 18613

SEQ ID NO: 38252 - DNA, 32 bp, Homo Sapiens
gggcgtatagctcaggggtagagcatttgact

SEQ ID NO: 38253 - DNA, 25 bp, Homo Sapiens
gggctcacatcaccccataaacacc

SEQ ID NO: 38254 - DNA, 26 bp, Homo Sapiens
gggctcacatcaccccataaacacca

SEQ ID NO: 38255 - DNA, 16 bp, Homo Sapiens
ggggaattagctcaaa

SEQ ID NO: 38256 - DNA, 19 bp, Homo Sapiens
ggggaattagctcaaatgg

SEQ ID NO: 38257 - DNA, 20 bp, Homo Sapiens
ggggaattagctcaaatggt

SEQ ID NO: 38258 - DNA, 23 bp, Homo Sapiens
ggggaattagctcaaatggtaga

SEQ ID NO: 38259 - DNA, 25 bp, Homo Sapiens
ggggaattagctcaaatggtagagc

SEQ ID NO: 38260 - DNA, 32 bp, Homo Sapiens; identical to SEQ ID NO: 18633

SEQ ID NO: 38261 - DNA, 33 bp, Homo Sapiens; identical to SEQ ID NO: 18634

SEQ ID NO: 38262 - DNA, 33 bp, Homo Sapiens; identical to SEQ ID NO: 18635

SEQ ID NO: 38263 - DNA, 33 bp, Homo Sapiens
ggggaattagctcaagtggtagagcgcttgctt

SEQ ID NO: 38264 - DNA, 16 bp, Homo Sapiens
ggggatgtagctcagt

SEQ ID NO: 38265 - DNA, 17 bp, Homo Sapiens
ggggatgtagctcagtg

SEQ ID NO: 38266 - DNA, 18 bp, Homo Sapiens
ggggatgtagctcagtgg

SEQ ID NO: 38267 - DNA, 19 bp, Homo Sapiens
ggggatgtagctcagtggt

SEQ ID NO: 38268 - DNA, 20 bp, Homo Sapiens
ggggatgtagctcagtggta

SEQ ID NO: 38269 - DNA, 21 bp, Homo Sapiens
ggggatgtagctcagtggtag

SEQ ID NO: 38270 - DNA, 22 bp, Homo Sapiens
ggggatgtagctcagtggtaga

SEQ ID NO: 38271 - DNA, 23 bp, Homo Sapiens
ggggatgtagctcagtggtagag

SEQ ID NO: 38272 - DNA, 24 bp, Homo Sapiens
ggggatgtagctcagtggtagagc

SEQ ID NO: 38273 - DNA, 25 bp, Homo Sapiens
ggggatgtagctcagtggtagagcg

SEQ ID NO: 38274 - DNA, 26 bp, Homo Sapiens
ggggatgtagctcagtggtagagcgc

SEQ ID NO: 38275 - DNA, 27 bp, Homo Sapiens
ggggatgtagctcagtggtagagcgca

SEQ ID NO: 38276 - DNA, 28 bp, Homo Sapiens
ggggatgtagctcagtggtagagcgcat

SEQ ID NO: 38277 - DNA, 29 bp, Homo Sapiens
ggggatgtagctcagtggtagagcgcatg

SEQ ID NO: 38278 - DNA, 30 bp, Homo Sapiens; identical to SEQ ID NO: 18649

SEQ ID NO: 38279 - DNA, 31 bp, Homo Sapiens; identical to SEQ ID NO: 18650

SEQ ID NO: 38280 - DNA, 32 bp, Homo Sapiens; identical to SEQ ID NO: 18651

SEQ ID NO: 38281 - DNA, 27 bp, Homo Sapiens
ggggatgtagctcagtggtagagcgcg

SEQ ID NO: 38282 - DNA, 28 bp, Homo Sapiens
ggggatgtagctcagtggtagagcgcgc

SEQ ID NO: 38283 - DNA, 29 bp, Homo Sapiens
ggggatgtagctcagtggtagagcgcgcg

SEQ ID NO: 38284 - DNA, 30 bp, Homo Sapiens; identical to SEQ ID NO: 18658

SEQ ID NO: 38285 - DNA, 31 bp, Homo Sapiens; identical to SEQ ID NO: 18659

SEQ ID NO: 38286 - DNA, 32 bp, Homo Sapiens; identical to SEQ ID NO: 18660

SEQ ID NO: 38287 - DNA, 22 bp, Homo Sapiens
ggggattagctcaaatggtaga

SEQ ID NO: 38288 - DNA, 31 bp, Homo Sapiens
ggggattagctcaaatggtagagcgctcgct

SEQ ID NO: 38289 - DNA, 32 bp, Homo Sapiens; identical to SEQ ID NO: 18665

SEQ ID NO: 38290 - DNA, 16 bp, Homo Sapiens
ggggattgtgggttcg

SEQ ID NO: 38291 - DNA, 21 bp, Homo Sapiens
ggggattgtgggttcgagtcc

SEQ ID NO: 38292 - DNA, 22 bp, Homo Sapiens
ggggattgtgggttcgagtccc

SEQ ID NO: 38293 - DNA, 23 bp, Homo Sapiens
ggggattgtgggttcgagtccca

SEQ ID NO: 38294 - DNA, 25 bp, Homo Sapiens
ggggattgtgggttcgagtcccatc

SEQ ID NO: 38295 - DNA, 32 bp, Homo Sapiens; identical to SEQ ID NO: 18672

SEQ ID NO: 38296 - DNA, 33 bp, Homo Sapiens; identical to SEQ ID NO: 18673

SEQ ID NO: 38297 - DNA, 34 bp, Homo Sapiens; identical to SEQ ID NO: 18674

SEQ ID NO: 38298 - DNA, 35 bp, Homo Sapiens; identical to SEQ ID NO: 18675

SEQ ID NO: 38299 - DNA, 16 bp, Homo Sapiens
gggggattagctcaaa

SEQ ID NO: 38300 - DNA, 19 bp, Homo Sapiens
gggggattagctcaaatgg

SEQ ID NO: 38301 - DNA, 20 bp, Homo Sapiens
gggggattagctcaaatggt

SEQ ID NO: 38302 - DNA, 22 bp, Homo Sapiens
gggggattagctcaaatggtag

SEQ ID NO: 38303 - DNA, 23 bp, Homo Sapiens
gggggattagctcaaatggtaga

SEQ ID NO: 38304 - DNA, 24 bp, Homo Sapiens
gggggattagctcaaatggtagag

SEQ ID NO: 38305 - DNA, 25 bp, Homo Sapiens
gggggattagctcaaatggtagagc

SEQ ID NO: 38306 - DNA, 29 bp, Homo Sapiens
gggggattagctcaaatggtagagcgctc

SEQ ID NO: 38307 - DNA, 31 bp, Homo Sapiens; identical to SEQ ID NO: 18691

SEQ ID NO: 38308 - DNA, 32 bp, Homo Sapiens; identical to SEQ ID NO: 18692

SEQ ID NO: 38309 - DNA, 33 bp, Homo Sapiens; identical to SEQ ID NO: 18693

SEQ ID NO: 38310 - DNA, 31 bp, Homo Sapiens; identical to SEQ ID NO: 18699

SEQ ID NO: 38311 - DNA, 32 bp, Homo Sapiens; identical to SEQ ID NO: 18700

SEQ ID NO: 38312 - DNA, 33 bp, Homo Sapiens; identical to SEQ ID NO: 18701

SEQ ID NO: 38313 - DNA, 34 bp, Homo Sapiens; identical to SEQ ID NO: 18702

SEQ ID NO: 38314 - DNA, 33 bp, Homo Sapiens
gggggcgtgggttcgaatcccaccgctgccacc

SEQ ID NO: 38315 - DNA, 33 bp, Homo Sapiens
ggggggtgtagctcagtggtagagcgcgtgctt

SEQ ID NO: 38316 - DNA, 16 bp, Homo Sapiens
gggggtatagctcagc

SEQ ID NO: 38317 - DNA, 16 bp, Homo Sapiens
gggggtatagctcagg

SEQ ID NO: 38318 - DNA, 17 bp, Homo Sapiens
gggggtatagctcaggg

SEQ ID NO: 38319 - DNA, 18 bp, Homo Sapiens
gggggtatagctcagggg

SEQ ID NO: 38320 - DNA, 31 bp, Homo Sapiens; identical to SEQ ID NO: 18723

SEQ ID NO: 38321 - DNA, 32 bp, Homo Sapiens; identical to SEQ ID NO: 18724

SEQ ID NO: 38322 - DNA, 33 bp, Homo Sapiens; identical to SEQ ID NO: 18725

SEQ ID NO: 38323 - DNA, 34 bp, Homo Sapiens; identical to SEQ ID NO: 18726

SEQ ID NO: 38324 - DNA, 33 bp, Homo Sapiens; identical to SEQ ID NO: 18729

SEQ ID NO: 38325 - DNA, 16 bp, Homo Sapiens
gggggtatagctcagt

SEQ ID NO: 38326 - DNA, 17 bp, Homo Sapiens
gggggtatagctcagtg

SEQ ID NO: 38327 - DNA, 18 bp, Homo Sapiens
gggggtatagctcagtgg

SEQ ID NO: 38328 - DNA, 33 bp, Homo Sapiens; identical to SEQ ID NO: 18737

SEQ ID NO: 38329 - DNA, 34 bp, Homo Sapiens; identical to SEQ ID NO: 18738

SEQ ID NO: 38330 - DNA, 35 bp, Homo Sapiens; identical to SEQ ID NO: 18739

SEQ ID NO: 38331 - DNA, 19 bp, Homo Sapiens
gggggtatagctcagtggt

SEQ ID NO: 38332 - DNA, 22 bp, Homo Sapiens
gggggtatagctcagtggtaga

SEQ ID NO: 38333 - DNA, 24 bp, Homo Sapiens
gggggtatagctcagtggtagagc

SEQ ID NO: 38334 - DNA, 25 bp, Homo Sapiens
gggggtatagctcagtggtagagca

SEQ ID NO: 38335 - DNA, 27 bp, Homo Sapiens
gggggtatagctcagtggtagagcatt

SEQ ID NO: 38336 - DNA, 29 bp, Homo Sapiens
gggggtatagctcagtggtagagcatttg

SEQ ID NO: 38337 - DNA, 31 bp, Homo Sapiens; identical to SEQ ID NO: 18753

SEQ ID NO: 38338 - DNA, 32 bp, Homo Sapiens; identical to SEQ ID NO: 18754

SEQ ID NO: 38339 - DNA, 33 bp, Homo Sapiens; identical to SEQ ID NO: 18755

SEQ ID NO: 38340 - DNA, 34 bp, Homo Sapiens; identical to SEQ ID NO: 18756

SEQ ID NO: 38341 - DNA, 35 bp, Homo Sapiens; identical to SEQ ID NO: 18757

SEQ ID NO: 38342 - DNA, 30 bp, Homo Sapiens
gggggtatagctcagtggtagagcgcgtgc

SEQ ID NO: 38343 - DNA, 31 bp, Homo Sapiens
gggggtatagctcagtggtagagcgcgtgct

SEQ ID NO: 38344 - DNA, 32 bp, Homo Sapiens; identical to SEQ ID NO: 18761

SEQ ID NO: 38345 - DNA, 25 bp, Homo Sapiens
gggggtatagcttagcggtagagca

SEQ ID NO: 38346 - DNA, 32 bp, Homo Sapiens; identical to SEQ ID NO: 18765

SEQ ID NO: 38347 - DNA, 33 bp, Homo Sapiens; identical to SEQ ID NO: 18766

SEQ ID NO: 38348 - DNA, 34 bp, Homo Sapiens; identical to SEQ ID NO: 18767

SEQ ID NO: 38349 - DNA, 24 bp, Homo Sapiens
gggggtcgattccccgacggggag

SEQ ID NO: 38350 - DNA, 25 bp, Homo Sapiens
gggggtcgattccccgacggggagc

SEQ ID NO: 38351 - DNA, 26 bp, Homo Sapiens
gggggtcgattccccgacggggagcc

SEQ ID NO: 38352 - DNA, 16 bp, Homo Sapiens
gggggtgtagctcagt

SEQ ID NO: 38353 - DNA, 17 bp, Homo Sapiens
gggggtgtagctcagtg

SEQ ID NO: 38354 - DNA, 18 bp, Homo Sapiens
gggggtgtagctcagtgg

SEQ ID NO: 38355 - DNA, 19 bp, Homo Sapiens
gggggtgtagctcagtggt

SEQ ID NO: 38356 - DNA, 20 bp, Homo Sapiens
gggggtgtagctcagtggta

SEQ ID NO: 38357 - DNA, 21 bp, Homo Sapiens
gggggtgtagctcagtggtag

SEQ ID NO: 38358 - DNA, 22 bp, Homo Sapiens
gggggtgtagctcagtggtaga

SEQ ID NO: 38359 - DNA, 23 bp, Homo Sapiens
gggggtgtagctcagtggtagag

SEQ ID NO: 38360 - DNA, 24 bp, Homo Sapiens
gggggtgtagctcagtggtagagc

SEQ ID NO: 38361 - DNA, 25 bp, Homo Sapiens
gggggtgtagctcagtggtagagca

SEQ ID NO: 38362 - DNA, 31 bp, Homo Sapiens; identical to SEQ ID NO: 18788

SEQ ID NO: 38363 - DNA, 32 bp, Homo Sapiens; identical to SEQ ID NO: 18789

SEQ ID NO: 38364 - DNA, 33 bp, Homo Sapiens; identical to SEQ ID NO: 18790

SEQ ID NO: 38365 - DNA, 34 bp, Homo Sapiens; identical to SEQ ID NO: 18791

SEQ ID NO: 38366 - DNA, 25 bp, Homo Sapiens
gggggtgtagctcagtggtagagcg

SEQ ID NO: 38367 - DNA, 26 bp, Homo Sapiens
gggggtgtagctcagtggtagagcgc

SEQ ID NO: 38368 - DNA, 28 bp, Homo Sapiens
gggggtgtagctcagtggtagagcgcat

SEQ ID NO: 38369 - DNA, 31 bp, Homo Sapiens; identical to SEQ ID NO: 18794

SEQ ID NO: 38370 - DNA, 32 bp, Homo Sapiens; identical to SEQ ID NO: 18795

SEQ ID NO: 38371 - DNA, 27 bp, Homo Sapiens
gggggtgtagctcagtggtagagcgcg

SEQ ID NO: 38372 - DNA, 28 bp, Homo Sapiens
gggggtgtagctcagtggtagagcgcgt

SEQ ID NO: 38373 - DNA, 29 bp, Homo Sapiens
gggggtgtagctcagtggtagagcgcgtg

SEQ ID NO: 38374 - DNA, 30 bp, Homo Sapiens; identical to SEQ ID NO: 18801

SEQ ID NO: 38375 - DNA, 31 bp, Homo Sapiens; identical to SEQ ID NO: 18802

SEQ ID NO: 38376 - DNA, 32 bp, Homo Sapiens; identical to SEQ ID NO: 18803

SEQ ID NO: 38377 - DNA, 33 bp, Homo Sapiens; identical to SEQ ID NO: 18805

SEQ ID NO: 38378 - DNA, 35 bp, Homo Sapiens; identical to SEQ ID NO: 18806

SEQ ID NO: 38379 - DNA, 18 bp, Homo Sapiens
ggggtagagcatttgact

SEQ ID NO: 38380 - DNA, 20 bp, Homo Sapiens
ggggtagagcatttgactgc

SEQ ID NO: 38381 - DNA, 16 bp, Homo Sapiens
ggggtatagctcaggg

SEQ ID NO: 38382 - DNA, 31 bp, Homo Sapiens; identical to SEQ ID NO: 18818

SEQ ID NO: 38383 - DNA, 16 bp, Homo Sapiens
ggggtatgattctcgc

SEQ ID NO: 38384 - DNA, 17 bp, Homo Sapiens
ggggtatgattctcgct

SEQ ID NO: 38385 - DNA, 18 bp, Homo Sapiens
ggggtatgattctcgctt

SEQ ID NO: 38386 - DNA, 16 bp, Homo Sapiens
ggggtatgattctcgg

SEQ ID NO: 38387 - DNA, 17 bp, Homo Sapiens
ggggtatgattctcggt

SEQ ID NO: 38388 - DNA, 18 bp, Homo Sapiens
ggggtatgattctcggtt

SEQ ID NO: 38389 - DNA, 23 bp, Homo Sapiens
ggggtcgattccccgacggggag

SEQ ID NO: 38390 - DNA, 24 bp, Homo Sapiens
ggggtcgattccccgacggggagc

SEQ ID NO: 38391 - DNA, 25 bp, Homo Sapiens
ggggtcgattccccgacggggagcc

SEQ ID NO: 38392 - DNA, 24 bp, Homo Sapiens
ggggtcgattccctgacggggagc

SEQ ID NO: 38393 - DNA, 31 bp, Homo Sapiens
ggggtcgcgagttcaaatctcgctggggcct

SEQ ID NO: 38394 - DNA, 32 bp, Homo Sapiens; identical to SEQ ID NO: 18838

SEQ ID NO: 38395 - DNA, 32 bp, Homo Sapiens
ggggtcgcgagttcaattctcgctggggcctc

SEQ ID NO: 38396 - DNA, 32 bp, Homo Sapiens
ggggtcgcgagttcgatcctcgctggggcctc

SEQ ID NO: 38397 - DNA, 17 bp, Homo Sapiens
ggggtgtagctcagtgg

SEQ ID NO: 38398 - DNA, 22 bp, Homo Sapiens
ggggtgtagctcagtggtagag

SEQ ID NO: 38399 - DNA, 31 bp, Homo Sapiens; identical to SEQ ID NO: 18841

SEQ ID NO: 38400 - DNA, 25 bp, Homo Sapiens
ggggttaggcctctttttaccacca

SEQ ID NO: 38401 - DNA, 25 bp, Homo Sapiens
ggggttcaagtccctgttcgggcgc

SEQ ID NO: 38402 - DNA, 24 bp, Homo Sapiens
ggggttcaattccccgacggggag

SEQ ID NO: 38403 - DNA, 25 bp, Homo Sapiens
ggggttcaattccccgacggggagc

SEQ ID NO: 38404 - DNA, 26 bp, Homo Sapiens
ggggttcaattccccgacggggagcc

SEQ ID NO: 38405 - DNA, 27 bp, Homo Sapiens
ggggttcaattccccgacggggagcca

SEQ ID NO: 38406 - DNA, 25 bp, Homo Sapiens
ggggttcgattccccaacggggagc

SEQ ID NO: 38407 - DNA, 26 bp, Homo Sapiens
ggggttcgattccccaacggggagcc

SEQ ID NO: 38408 - DNA, 21 bp, Homo Sapiens
ggggttcgattccccgacggg

SEQ ID NO: 38409 - DNA, 22 bp, Homo Sapiens
ggggttcgattccccgacgggg

SEQ ID NO: 38410 - DNA, 23 bp, Homo Sapiens
ggggttcgattccccgacgggga

SEQ ID NO: 38411 - DNA, 24 bp, Homo Sapiens
ggggttcgattccccgacggggag

SEQ ID NO: 38412 - DNA, 25 bp, Homo Sapiens
ggggttcgattccccgacggggagc

SEQ ID NO: 38413 - DNA, 26 bp, Homo Sapiens
ggggttcgattccccgacggggagcc

SEQ ID NO: 38414 - DNA, 27 bp, Homo Sapiens
ggggttcgattccccgacggggagcca

SEQ ID NO: 38415 - DNA, 17 bp, Homo Sapiens
gggtagagcatttgact

SEQ ID NO: 38416 - DNA, 16 bp, Homo Sapiens
gggtatagctcagggg

SEQ ID NO: 38417 - DNA, 32 bp, Homo Sapiens; identical to SEQ ID NO: 18886

SEQ ID NO: 38418 - DNA, 31 bp, Homo Sapiens; identical to SEQ ID NO: 18902

SEQ ID NO: 38419 - DNA, 32 bp, Homo Sapiens; identical to SEQ ID NO: 18903

SEQ ID NO: 38420 - DNA, 33 bp, Homo Sapiens; identical to SEQ ID NO: 18904

SEQ ID NO: 38421 - DNA, 16 bp, Homo Sapiens
gggtatgattctcgct

SEQ ID NO: 38422 - DNA, 17 bp, Homo Sapiens
gggtatgattctcgctt

SEQ ID NO: 38423 - DNA, 16 bp, Homo Sapiens
gggtatgattctcggt

SEQ ID NO: 38424 - DNA, 17 bp, Homo Sapiens
gggtatgattctcggtt

SEQ ID NO: 38425 - DNA, 28 bp, Homo Sapiens
gggtatgattctcggtttgggtccgaga

SEQ ID NO: 38426 - DNA, 29 bp, Homo Sapiens
gggtccagggttcaagtccctgttcgggc

SEQ ID NO: 38427 - DNA, 30 bp, Homo Sapiens; identical to SEQ ID NO: 18925

SEQ ID NO: 38428 - DNA, 31 bp, Homo Sapiens; identical to SEQ ID NO: 18926

SEQ ID NO: 38429 - DNA, 32 bp, Homo Sapiens; identical to SEQ ID NO: 18927

SEQ ID NO: 38430 - DNA, 23 bp, Homo Sapiens
gggtcgattccccgacggggagc

SEQ ID NO: 38431 - DNA, 24 bp, Homo Sapiens
gggtcgattccccgacggggagcc

SEQ ID NO: 38432 - DNA, 31 bp, Homo Sapiens
gggtcgcgagttcaaatctcgctggggcctc

SEQ ID NO: 38433 - DNA, 20 bp, Homo Sapiens
gggtcgtgggttcgagcccc

SEQ ID NO: 38434 - DNA, 29 bp, Homo Sapiens
gggtcgtgggttcgagccccacgttgggc

SEQ ID NO: 38435 - DNA, 30 bp, Homo Sapiens; identical to SEQ ID NO: 18937

SEQ ID NO: 38436 - DNA, 31 bp, Homo Sapiens; identical to SEQ ID NO: 18938

SEQ ID NO: 38437 - DNA, 32 bp, Homo Sapiens; identical to SEQ ID NO: 18939

SEQ ID NO: 38438 - DNA, 17 bp, Homo Sapiens
gggtgcgagaggtcccg

SEQ ID NO: 38439 - DNA, 40 bp, Homo Sapiens; identical to SEQ ID NO: 18947

SEQ ID NO: 38440 - DNA, 26 bp, Homo Sapiens
gggtggttcagtggtagaattctcgc

SEQ ID NO: 38441 - DNA, 27 bp, Homo Sapiens
gggtggttcagtggtagaattctcgcc

SEQ ID NO: 38442 - DNA, 28 bp, Homo Sapiens
gggtggttcagtggtagaattctcgcct

SEQ ID NO: 38443 - DNA, 31 bp, Homo Sapiens; identical to SEQ ID NO: 18975

SEQ ID NO: 38444 - DNA, 16 bp, Homo Sapiens
gggtgtagctcagtgg

SEQ ID NO: 38445 - DNA, 32 bp, Homo Sapiens; identical to SEQ ID NO: 18983

SEQ ID NO: 38446 - DNA, 28 bp, Homo Sapiens
gggtgtagctcagtggtagagcgcgtgc

SEQ ID NO: 38447 - DNA, 16 bp, Homo Sapiens
gggtgtgataggtggc

SEQ ID NO: 38448 - DNA, 17 bp, Homo Sapiens
gggtgtgataggtggca

SEQ ID NO: 38449 - DNA, 24 bp, Homo Sapiens
gggtgtgataggtggcacggagaa

SEQ ID NO: 38450 - DNA, 17 bp, Homo Sapiens
gggttagagcactggtc

SEQ ID NO: 38451 - DNA, 24 bp, Homo Sapiens
gggttcaagtccctgtccaggcgc

SEQ ID NO: 38452 - DNA, 22 bp, Homo Sapiens
gggttcaagtccctgttcgggc

SEQ ID NO: 38453 - DNA, 23 bp, Homo Sapiens
gggttcaagtccctgttcgggcg

SEQ ID NO: 38454 - DNA, 24 bp, Homo Sapiens
gggttcaagtccctgttcgggcgc

SEQ ID NO: 38455 - DNA, 25 bp, Homo Sapiens
gggttcaagtccctgttcgggcgcc

SEQ ID NO: 38456 - DNA, 25 bp, Homo Sapiens
gggttcaatccccggcacctccacc

SEQ ID NO: 38457 - DNA, 23 bp, Homo Sapiens
gggttcaattccccgacggggag

SEQ ID NO: 38458 - DNA, 24 bp, Homo Sapiens
gggttcaattccccgacggggagc

SEQ ID NO: 38459 - DNA, 25 bp, Homo Sapiens
gggttcaattccccgacggggagcc

SEQ ID NO: 38460 - DNA, 24 bp, Homo Sapiens
gggttcaattcccggtcagggaac

SEQ ID NO: 38461 - DNA, 23 bp, Homo Sapiens
gggttcgaaccccgtccgtgcct

SEQ ID NO: 38462 - DNA, 25 bp, Homo Sapiens
gggttcgaatcccaccagagtcgcc

SEQ ID NO: 38463 - DNA, 25 bp, Homo Sapiens
gggttcgaatcccaccgctgccacc

SEQ ID NO: 38464 - DNA, 25 bp, Homo Sapiens
gggttcgaatcccaccttcgtcgcc

SEQ ID NO: 38465 - DNA, 23 bp, Homo Sapiens
gggttcgaatcccagcggtgcct

SEQ ID NO: 38466 - DNA, 24 bp, Homo Sapiens
gggttcgaatcccatcctcgtcgc

SEQ ID NO: 38467 - DNA, 25 bp, Homo Sapiens
gggttcgaatcccatcctcgtcgcc

SEQ ID NO: 38468 - DNA, 23 bp, Homo Sapiens
gggttcgaatcccttcgtggttg

SEQ ID NO: 38469 - DNA, 24 bp, Homo Sapiens
gggttcgaatcccttcgtggttgc

SEQ ID NO: 38470 - DNA, 25 bp, Homo Sapiens
gggttcgaatcccttcgtggttgcc

SEQ ID NO: 38471 - DNA, 21 bp, Homo Sapiens
gggttcgactcccggtatggg

SEQ ID NO: 38472 - DNA, 22 bp, Homo Sapiens
gggttcgactcccggtatggga

SEQ ID NO: 38473 - DNA, 23 bp, Homo Sapiens
gggttcgactcccggtatgggaa

SEQ ID NO: 38474 - DNA, 24 bp, Homo Sapiens
gggttcgactcccggtatgggaac

SEQ ID NO: 38475 - DNA, 25 bp, Homo Sapiens
gggttcgactcccggtatgggaacc

SEQ ID NO: 38476 - DNA, 17 bp, Homo Sapiens
gggttcgactcccggtg

SEQ ID NO: 38477 - DNA, 18 bp, Homo Sapiens
gggttcgactcccggtgt

SEQ ID NO: 38478 - DNA, 19 bp, Homo Sapiens
gggttcgactcccggtgtg

SEQ ID NO: 38479 - DNA, 20 bp, Homo Sapiens
gggttcgactcccggtgtgg

SEQ ID NO: 38480 - DNA, 21 bp, Homo Sapiens
gggttcgactcccggtgtggg

SEQ ID NO: 38481 - DNA, 22 bp, Homo Sapiens
gggttcgactcccggtgtggga

SEQ ID NO: 38482 - DNA, 23 bp, Homo Sapiens
gggttcgactcccggtgtgggaa

SEQ ID NO: 38483 - DNA, 24 bp, Homo Sapiens
gggttcgactcccggtgtgggaac

SEQ ID NO: 38484 - DNA, 25 bp, Homo Sapiens
gggttcgactcccggtgtgggaacc

SEQ ID NO: 38485 - DNA, 26 bp, Homo Sapiens
gggttcgactcccggtgtgggaacca

SEQ ID NO: 38486 - DNA, 23 bp, Homo Sapiens
gggttcgagccccacgttgggcg

SEQ ID NO: 38487 - DNA, 24 bp, Homo Sapiens
gggttcgagccccacgttgggcgc

SEQ ID NO: 38488 - DNA, 25 bp, Homo Sapiens
gggttcgagccccacgttgggcgcc

SEQ ID NO: 38489 - DNA, 25 bp, Homo Sapiens
gggttcgagtcccatctggggtgcc

SEQ ID NO: 38490 - DNA, 26 bp, Homo Sapiens
gggttcgagtcccatctggggtgcca

SEQ ID NO: 38491 - DNA, 25 bp, Homo Sapiens
gggttcgagtcccatctgggtcgcc

SEQ ID NO: 38492 - DNA, 23 bp, Homo Sapiens
gggttcgagtcccttcgtggtcg

SEQ ID NO: 38493 - DNA, 24 bp, Homo Sapiens
gggttcgagtcccttcgtggtcgc

SEQ ID NO: 38494 - DNA, 25 bp, Homo Sapiens
gggttcgagtcccttcgtggtcgcc

SEQ ID NO: 38495 - DNA, 26 bp, Homo Sapiens
gggttcgagtcccttcgtggtcgcca

SEQ ID NO: 38496 - DNA, 16 bp, Homo Sapiens
gggttcgatccccggc

SEQ ID NO: 38497 - DNA, 17 bp, Homo Sapiens
gggttcgatccccggca

SEQ ID NO: 38498 - DNA, 24 bp, Homo Sapiens
gggttcgatccccggcatctccac

SEQ ID NO: 38499 - DNA, 25 bp, Homo Sapiens
gggttcgatccccggcatctccacc

SEQ ID NO: 38500 - DNA, 21 bp, Homo Sapiens
gggttcgatccccgtacgggc

SEQ ID NO: 38501 - DNA, 22 bp, Homo Sapiens
gggttcgatccccgtacgggcc

SEQ ID NO: 38502 - DNA, 23 bp, Homo Sapiens
gggttcgatccccgtacgggcca

SEQ ID NO: 38503 - DNA, 24 bp, Homo Sapiens
gggttcgattccccaacggggagc

SEQ ID NO: 38504 - DNA, 21 bp, Homo Sapiens
gggttcgattccccgacgggg

SEQ ID NO: 38505 - DNA, 22 bp, Homo Sapiens
gggttcgattccccgacgggga

SEQ ID NO: 38506 - DNA, 23 bp, Homo Sapiens
gggttcgattccccgacggggag

SEQ ID NO: 38507 - DNA, 24 bp, Homo Sapiens
gggttcgattccccgacggggagc

SEQ ID NO: 38508 - DNA, 25 bp, Homo Sapiens
gggttcgattccccgacggggagcc

SEQ ID NO: 38509 - DNA, 26 bp, Homo Sapiens
gggttcgattccccgacggggagcca

SEQ ID NO: 38510 - DNA, 24 bp, Homo Sapiens
gggttcgattcccggccagggaac

SEQ ID NO: 38511 - DNA, 20 bp, Homo Sapiens
gggttcgattcccgggcggc

SEQ ID NO: 38512 - DNA, 22 bp, Homo Sapiens
gggttcgattcccgggcggcgc

SEQ ID NO: 38513 - DNA, 23 bp, Homo Sapiens
gggttcgattcccgggcggcgca

SEQ ID NO: 38514 - DNA, 24 bp, Homo Sapiens
gggttcgattcccgggcggcgcac

SEQ ID NO: 38515 - DNA, 25 bp, Homo Sapiens
gggttcgattcccgggcggcgcacc

SEQ ID NO: 38516 - DNA, 19 bp, Homo Sapiens
gggttcgattcccggtcag

SEQ ID NO: 38517 - DNA, 20 bp, Homo Sapiens
gggttcgattcccggtcagg

SEQ ID NO: 38518 - DNA, 22 bp, Homo Sapiens
gggttcgattcccggtcaggaa

SEQ ID NO: 38519 - DNA, 24 bp, Homo Sapiens
gggttcgattcccggtcaggaaac

SEQ ID NO: 38520 - DNA, 21 bp, Homo Sapiens
gggttcgattcccggtcaggg

SEQ ID NO: 38521 - DNA, 22 bp, Homo Sapiens
gggttcgattcccggtcaggga

SEQ ID NO: 38522 - DNA, 23 bp, Homo Sapiens
gggttcgattcccggtcagggaa

SEQ ID NO: 38523 - DNA, 24 bp, Homo Sapiens
gggttcgattcccggtcagggaac

SEQ ID NO: 38524 - DNA, 25 bp, Homo Sapiens
gggttcgattcccggtcagggaacc

SEQ ID NO: 38525 - DNA, 26 bp, Homo Sapiens
gggttcgattcccggtcagggaacca

SEQ ID NO: 38526 - DNA, 23 bp, Homo Sapiens
gggttcgattcccggtcatggaa

SEQ ID NO: 38527 - DNA, 24 bp, Homo Sapiens
gggttcgattcccggtcatggaac

SEQ ID NO: 38528 - DNA, 23 bp, Homo Sapiens
gggttcgattctcatagtcctag

SEQ ID NO: 38529 - DNA, 18 bp, Homo Sapiens
gggtttccccgcgcaggt

SEQ ID NO: 38530 - DNA, 21 bp, Homo Sapiens
ggtaaaatggctgagtgaagc

SEQ ID NO: 38531 - DNA, 23 bp, Homo Sapiens
ggtaaaatggctgagtgaagcat

SEQ ID NO: 38532 - DNA, 25 bp, Homo Sapiens
ggtaaaatggctgagtgaagcattg

SEQ ID NO: 38533 - DNA, 28 bp, Homo Sapiens
ggtaaaatggctgagtgaagcattggac

SEQ ID NO: 38534 - DNA, 29 bp, Homo Sapiens
ggtaaaatggctgagtgaagcattggact

SEQ ID NO: 38535 - DNA, 30 bp, Homo Sapiens; identical to SEQ ID NO: 19118

SEQ ID NO: 38536 - DNA, 31 bp, Homo Sapiens; identical to SEQ ID NO: 19119

SEQ ID NO: 38537 - DNA, 32 bp, Homo Sapiens; identical to SEQ ID NO: 19120

SEQ ID NO: 38538 - DNA, 33 bp, Homo Sapiens; identical to SEQ ID NO: 19121

SEQ ID NO: 38539 - DNA, 34 bp, Homo Sapiens; identical to SEQ ID NO: 19122

SEQ ID NO: 38540 - DNA, 36 bp, Homo Sapiens; identical to SEQ ID NO: 19124

SEQ ID NO: 38541 - DNA, 37 bp, Homo Sapiens; identical to SEQ ID NO: 19125

SEQ ID NO: 38542 - DNA, 38 bp, Homo Sapiens; identical to SEQ ID NO: 19143

SEQ ID NO: 38543 - DNA, 40 bp, Homo Sapiens; identical to SEQ ID NO: 19145

SEQ ID NO: 38544 - DNA, 36 bp, Homo Sapiens; identical to SEQ ID NO: 19152

SEQ ID NO: 38545 - DNA, 16 bp, Homo Sapiens
ggtagaattctcgcct

SEQ ID NO: 38546 - DNA, 22 bp, Homo Sapiens
ggtagaattctcgcctcccacg

SEQ ID NO: 38547 - DNA, 37 bp, Homo Sapiens; identical to SEQ ID NO: 19182

SEQ ID NO: 38548 - DNA, 17 bp, Homo Sapiens
ggtagaattctcgcctg

SEQ ID NO: 38549 - DNA, 18 bp, Homo Sapiens
ggtagaattctcgcctgc

SEQ ID NO: 38550 - DNA, 19 bp, Homo Sapiens
ggtagaattctcgcctgcc

SEQ ID NO: 38551 - DNA, 22 bp, Homo Sapiens
ggtagaattctcgcctgccacg

SEQ ID NO: 38552 - DNA, 25 bp, Homo Sapiens
ggtagaattctcgcctgccacgcgg

SEQ ID NO: 38553 - DNA, 26 bp, Homo Sapiens
ggtagaattctcgcctgccacgcggg

SEQ ID NO: 38554 - DNA, 27 bp, Homo Sapiens
ggtagaattctcgcctgccacgcggga

SEQ ID NO: 38555 - DNA, 28 bp, Homo Sapiens
ggtagaattctcgcctgccacgcgggag

SEQ ID NO: 38556 - DNA, 31 bp, Homo Sapiens; identical to SEQ ID NO: 19193

SEQ ID NO: 38557 - DNA, 32 bp, Homo Sapiens; identical to SEQ ID NO: 19194

SEQ ID NO: 38558 - DNA, 33 bp, Homo Sapiens; identical to SEQ ID NO: 19195

SEQ ID NO: 38559 - DNA, 34 bp, Homo Sapiens; identical to SEQ ID NO: 19196

SEQ ID NO: 38560 - DNA, 35 bp, Homo Sapiens; identical to SEQ ID NO: 19197

SEQ ID NO: 38561 - DNA, 16 bp, Homo Sapiens
ggtagagcagaggact

SEQ ID NO: 38562 - DNA, 16 bp, Homo Sapiens
ggtagagcatcagact

SEQ ID NO: 38563 - DNA, 18 bp, Homo Sapiens
ggtagagcatcagacttt

SEQ ID NO: 38564 - DNA, 16 bp, Homo Sapiens
ggtagagcatgagacc

SEQ ID NO: 38565 - DNA, 17 bp, Homo Sapiens
ggtagagcatgagaccc

SEQ ID NO: 38566 - DNA, 16 bp, Homo Sapiens
ggtagagcatgagact

SEQ ID NO: 38567 - DNA, 17 bp, Homo Sapiens
ggtagagcatgagactc

SEQ ID NO: 38568 - DNA, 23 bp, Homo Sapiens
ggtagagcatgagactcttaatc

SEQ ID NO: 38569 - DNA, 24 bp, Homo Sapiens
ggtagagcatgagactcttaatct

SEQ ID NO: 38570 - DNA, 25 bp, Homo Sapiens
ggtagagcatgagactcttaatctc

SEQ ID NO: 38571 - DNA, 38 bp, Homo Sapiens; identical to SEQ ID NO: 19223

SEQ ID NO: 38572 - DNA, 16 bp, Homo Sapiens
ggtagagcatgggact

SEQ ID NO: 38573 - DNA, 17 bp, Homo Sapiens
ggtagagcatgggactc

SEQ ID NO: 38574 - DNA, 18 bp, Homo Sapiens
ggtagagcatgggactct

SEQ ID NO: 38575 - DNA, 22 bp, Homo Sapiens
ggtagagcatgggactcttaat

SEQ ID NO: 38576 - DNA, 23 bp, Homo Sapiens
ggtagagcatgggactcttaatc

SEQ ID NO: 38577 - DNA, 24 bp, Homo Sapiens
ggtagagcatgggactcttaatcc

SEQ ID NO: 38578 - DNA, 25 bp, Homo Sapiens
ggtagagcatgggactcttaatccc

SEQ ID NO: 38579 - DNA, 35 bp, Homo Sapiens; identical to SEQ ID NO: 19240

SEQ ID NO: 38580 - DNA, 38 bp, Homo Sapiens; identical to SEQ ID NO: 19242

SEQ ID NO: 38581 - DNA, 16 bp, Homo Sapiens
ggtagagcatttgact

SEQ ID NO: 38582 - DNA, 17 bp, Homo Sapiens
ggtagagcatttgactg

SEQ ID NO: 38583 - DNA, 18 bp, Homo Sapiens
ggtagagcatttgactgc

SEQ ID NO: 38584 - DNA, 18 bp, Homo Sapiens
ggtagcgcgtctgactcc

SEQ ID NO: 38585 - DNA, 16 bp, Homo Sapiens
ggtagcgtggccgagc

SEQ ID NO: 38586 - DNA, 17 bp, Homo Sapiens
ggtagcgtggccgagcg

SEQ ID NO: 38587 - DNA, 18 bp, Homo Sapiens
ggtagcgtggccgagcgg

SEQ ID NO: 38588 - DNA, 19 bp, Homo Sapiens
ggtagcgtggccgagcggt

SEQ ID NO: 38589 - DNA, 20 bp, Homo Sapiens
ggtagcgtggccgagcggtc

SEQ ID NO: 38590 - DNA, 21 bp, Homo Sapiens
ggtagcgtggccgagcggtct

SEQ ID NO: 38591 - DNA, 22 bp, Homo Sapiens
ggtagcgtggccgagcggtcta

SEQ ID NO: 38592 - DNA, 23 bp, Homo Sapiens
ggtagcgtggccgagcggtctaa

SEQ ID NO: 38593 - DNA, 24 bp, Homo Sapiens
ggtagcgtggccgagcggtctaag

SEQ ID NO: 38594 - DNA, 25 bp, Homo Sapiens
ggtagcgtggccgagcggtctaagg

SEQ ID NO: 38595 - DNA, 26 bp, Homo Sapiens
ggtagcgtggccgagcggtctaaggc

SEQ ID NO: 38596 - DNA, 28 bp, Homo Sapiens
ggtagcgtggccgagcggtctaaggcgc

SEQ ID NO: 38597 - DNA, 29 bp, Homo Sapiens
ggtagcgtggccgagcggtctaaggcgct

SEQ ID NO: 38598 - DNA, 32 bp, Homo Sapiens; identical to SEQ ID NO: 19266

SEQ ID NO: 38599 - DNA, 33 bp, Homo Sapiens; identical to SEQ ID NO: 19267

SEQ ID NO: 38600 - DNA, 34 bp, Homo Sapiens; identical to SEQ ID NO: 19268

SEQ ID NO: 38601 - DNA, 35 bp, Homo Sapiens; identical to SEQ ID NO: 19269

SEQ ID NO: 38602 - DNA, 16 bp, Homo Sapiens
ggtagcgtggccgagt

SEQ ID NO: 38603 - DNA, 18 bp, Homo Sapiens
ggtagcgtggccgagtgg

SEQ ID NO: 38604 - DNA, 19 bp, Homo Sapiens
ggtagcgtggccgagtggt

SEQ ID NO: 38605 - DNA, 22 bp, Homo Sapiens
ggtagcgtggccgagtggtcta

SEQ ID NO: 38606 - DNA, 25 bp, Homo Sapiens
ggtagcgtggccgagtggtctaagg

SEQ ID NO: 38607 - DNA, 26 bp, Homo Sapiens
ggtagcgtggccgagtggtctaaggc

SEQ ID NO: 38608 - DNA, 28 bp, Homo Sapiens
ggtagcgtggccgagtggtctaaggcgc

SEQ ID NO: 38609 - DNA, 29 bp, Homo Sapiens
ggtagcgtggccgagtggtctaaggcgct

SEQ ID NO: 38610 - DNA, 33 bp, Homo Sapiens; identical to SEQ ID NO: 19281

SEQ ID NO: 38611 - DNA, 34 bp, Homo Sapiens; identical to SEQ ID NO: 19282

SEQ ID NO: 38612 - DNA, 35 bp, Homo Sapiens; identical to SEQ ID NO: 19283

SEQ ID NO: 38613 - DNA, 19 bp, Homo Sapiens
ggtagctcagtcggtagag

SEQ ID NO: 38614 - DNA, 27 bp, Homo Sapiens
ggtagctcagtcggtagagcatcagac

SEQ ID NO: 38615 - DNA, 26 bp, Homo Sapiens
ggtagggtggccgagcggtctaaggc

SEQ ID NO: 38616 - DNA, 16 bp, Homo Sapiens
ggtagtgtggccgagc

SEQ ID NO: 38617 - DNA, 18 bp, Homo Sapiens
ggtagtgtggccgagcgg

SEQ ID NO: 38618 - DNA, 19 bp, Homo Sapiens
ggtagtgtggccgagcggt

SEQ ID NO: 38619 - DNA, 20 bp, Homo Sapiens
ggtagtgtggccgagcggtc

SEQ ID NO: 38620 - DNA, 21 bp, Homo Sapiens
ggtagtgtggccgagcggtct

SEQ ID NO: 38621 - DNA, 22 bp, Homo Sapiens
ggtagtgtggccgagcggtcta

SEQ ID NO: 38622 - DNA, 24 bp, Homo Sapiens
ggtagtgtggccgagcggtctaag

SEQ ID NO: 38623 - DNA, 25 bp, Homo Sapiens
ggtagtgtggccgagcggtctaagg

SEQ ID NO: 38624 - DNA, 26 bp, Homo Sapiens
ggtagtgtggccgagcggtctaaggc

SEQ ID NO: 38625 - DNA, 28 bp, Homo Sapiens
ggtagtgtggccgagcggtctaaggcgc

SEQ ID NO: 38626 - DNA, 29 bp, Homo Sapiens
ggtagtgtggccgagcggtctaaggcgct

SEQ ID NO: 38627 - DNA, 33 bp, Homo Sapiens
ggtagtgtggccgagcggtctaaggcgctggat

SEQ ID NO: 38628 - DNA, 34 bp, Homo Sapiens; identical to SEQ ID NO: 19296

SEQ ID NO: 38629 - DNA, 35 bp, Homo Sapiens; identical to SEQ ID NO: 19297

SEQ ID NO: 38630 - DNA, 31 bp, Homo Sapiens; identical to SEQ ID NO: 19309

SEQ ID NO: 38631 - DNA, 16 bp, Homo Sapiens
ggtatcatgcaagatt

SEQ ID NO: 38632 - DNA, 16 bp, Homo Sapiens
ggtatgattctcgctt

SEQ ID NO: 38633 - DNA, 18 bp, Homo Sapiens
ggtatgattctcgctttg

SEQ ID NO: 38634 - DNA, 19 bp, Homo Sapiens
ggtatgattctcgctttgg

SEQ ID NO: 38635 - DNA, 16 bp, Homo Sapiens
ggtatgattctcggtt

SEQ ID NO: 38636 - DNA, 23 bp, Homo Sapiens
ggtatgattctcggtttgggtcc

SEQ ID NO: 38637 - DNA, 27 bp, Homo Sapiens
ggtatgattctcggtttgggtccgaga

SEQ ID NO: 38638 - DNA, 36 bp, Homo Sapiens
ggtcagcactctggactctgaatccagcgatccgag

SEQ ID NO: 38639 - DNA, 27 bp, Homo Sapiens
ggtcagctaaataagctatcgggccca

SEQ ID NO: 38640 - DNA, 29 bp, Homo Sapiens
ggtccagggttcaagtccctgttcgggcg

SEQ ID NO: 38641 - DNA, 30 bp, Homo Sapiens; identical to SEQ ID NO: 19349

SEQ ID NO: 38642 - DNA, 31 bp, Homo Sapiens; identical to SEQ ID NO: 19350

SEQ ID NO: 38643 - DNA, 27 bp, Homo Sapiens
ggtcccatggtgtaatggttagcactc

SEQ ID NO: 38644 - DNA, 29 bp, Homo Sapiens
ggtcccatggtgtaatggttagcactctg

SEQ ID NO: 38645 - DNA, 31 bp, Homo Sapiens; identical to SEQ ID NO: 19362

SEQ ID NO: 38646 - DNA, 32 bp, Homo Sapiens; identical to SEQ ID NO: 19363

SEQ ID NO: 38647 - DNA, 33 bp, Homo Sapiens; identical to SEQ ID NO: 19364

SEQ ID NO: 38648 - DNA, 36 bp, Homo Sapiens; identical to SEQ ID NO: 19366

SEQ ID NO: 38649 - DNA, 41 bp, Homo Sapiens; identical to SEQ ID NO: 19368

SEQ ID NO: 38650 - DNA, 29 bp, Homo Sapiens
ggtccccggttcgaaaccgggcggaaaca

SEQ ID NO: 38651 - DNA, 29 bp, Homo Sapiens
ggtcccgggttcaaatcccggacgagccc

SEQ ID NO: 38652 - DNA, 31 bp, Homo Sapiens
ggtcccgggttcgatccccagcatctccacc

SEQ ID NO: 38653 - DNA, 30 bp, Homo Sapiens
ggtccctggttcgatcccgggtttcggcac

SEQ ID NO: 38654 - DNA, 31 bp, Homo Sapiens
ggtccctggttcgatcccgggtttcggcacc

SEQ ID NO: 38655 - DNA, 39 bp, Homo Sapiens
ggtccgagaggtcccgggttcaaatcccggacgagcccc

SEQ ID NO: 38656 - DNA, 28 bp, Homo Sapiens
ggtcctgagttcgaacctcagagggggc

SEQ ID NO: 38657 - DNA, 30 bp, Homo Sapiens
ggtcctgggttcgagccccagtggaaccac

SEQ ID NO: 38658 - DNA, 31 bp, Homo Sapiens; identical to SEQ ID NO: 19381

SEQ ID NO: 38659 - DNA, 17 bp, Homo Sapiens
ggtcgatggatcgaaac

SEQ ID NO: 38660 - DNA, 18 bp, Homo Sapiens
ggtcgatggatcgaaacc

SEQ ID NO: 38661 - DNA, 19 bp, Homo Sapiens
ggtcgatggatcgaaacca

SEQ ID NO: 38662 - DNA, 28 bp, Homo Sapiens
ggtcgatggatcgaaaccatcctctgct

SEQ ID NO: 38663 - DNA, 31 bp, Homo Sapiens; identical to SEQ ID NO: 19388

SEQ ID NO: 38664 - DNA, 16 bp, Homo Sapiens
ggtcgattccccgacg

SEQ ID NO: 38665 - DNA, 19 bp, Homo Sapiens
ggtcgattccccgacgggg

SEQ ID NO: 38666 - DNA, 20 bp, Homo Sapiens
ggtcgattccccgacgggga

SEQ ID NO: 38667 - DNA, 21 bp, Homo Sapiens
ggtcgattccccgacggggag

SEQ ID NO: 38668 - DNA, 22 bp, Homo Sapiens
ggtcgattccccgacggggagc

SEQ ID NO: 38669 - DNA, 23 bp, Homo Sapiens
ggtcgattccccgacggggagcc

SEQ ID NO: 38670 - DNA, 24 bp, Homo Sapiens
ggtcgattccccgacggggagcca

SEQ ID NO: 38671 - DNA, 30 bp, Homo Sapiens; identical to SEQ ID NO: 19395

SEQ ID NO: 38672 - DNA, 27 bp, Homo Sapiens
ggtcgcgggttcgatccccgtacgggc

SEQ ID NO: 38673 - DNA, 28 bp, Homo Sapiens
ggtcgcgggttcgatccccgtacgggcc

SEQ ID NO: 38674 - DNA, 29 bp, Homo Sapiens
ggtcgcgggttcgatccccgtacgggcca

SEQ ID NO: 38675 - DNA, 30 bp, Homo Sapiens; identical to SEQ ID NO: 19406

SEQ ID NO: 38676 - DNA, 31 bp, Homo Sapiens; identical to SEQ ID NO: 19407

SEQ ID NO: 38677 - DNA, 30 bp, Homo Sapiens
ggtcgctggttcgaatccggctcggaggac

SEQ ID NO: 38678 - DNA, 31 bp, Homo Sapiens; identical to SEQ ID NO: 19409

SEQ ID NO: 38679 - DNA, 30 bp, Homo Sapiens; identical to SEQ ID NO: 19411

SEQ ID NO: 38680 - DNA, 31 bp, Homo Sapiens; identical to SEQ ID NO: 19412

SEQ ID NO: 38681 - DNA, 28 bp, Homo Sapiens
ggtcgtgggttcgagccccacgttgggc

SEQ ID NO: 38682 - DNA, 29 bp, Homo Sapiens
ggtcgtgggttcgagccccacgttgggcg

SEQ ID NO: 38683 - DNA, 30 bp, Homo Sapiens; identical to SEQ ID NO: 19423

SEQ ID NO: 38684 - DNA, 27 bp, Homo Sapiens
ggtcgtggttgtagtccgtgcgagaat

SEQ ID NO: 38685 - DNA, 30 bp, Homo Sapiens; identical to SEQ ID NO: 19439

SEQ ID NO: 38686 - DNA, 31 bp, Homo Sapiens; identical to SEQ ID NO: 19440

SEQ ID NO: 38687 - DNA, 16 bp, Homo Sapiens
ggtctaaggcgctgcg

SEQ ID NO: 38688 - DNA, 16 bp, Homo Sapiens
ggtctaaggcgctgga

SEQ ID NO: 38689 - DNA, 18 bp, Homo Sapiens
ggtctagcggttaggatt

SEQ ID NO: 38690 - DNA, 20 bp, Homo Sapiens
ggtctaggggtatgattctc

SEQ ID NO: 38691 - DNA, 24 bp, Homo Sapiens
ggtctaggggtatgattctcgctt

SEQ ID NO: 38692 - DNA, 22 bp, Homo Sapiens
ggtctagtggctaggattcggc

SEQ ID NO: 38693 - DNA, 18 bp, Homo Sapiens
ggtctagtggttaggatt

SEQ ID NO: 38694 - DNA, 24 bp, Homo Sapiens
ggtctagtggttaggattcggcgc

SEQ ID NO: 38695 - DNA, 25 bp, Homo Sapiens
ggtctagtggttaggattcggcgct

SEQ ID NO: 38696 - DNA, 22 bp, Homo Sapiens
ggtgagcactctggactctgaa

SEQ ID NO: 38697 - DNA, 23 bp, Homo Sapiens
ggtgagcactctggactctgaat

SEQ ID NO: 38698 - DNA, 24 bp, Homo Sapiens
ggtgagcactctggactctgaatc

SEQ ID NO: 38699 - DNA, 25 bp, Homo Sapiens
ggtgagcactctggactctgaatcc

SEQ ID NO: 38700 - DNA, 26 bp, Homo Sapiens
ggtgagcactctggactctgaatcca

SEQ ID NO: 38701 - DNA, 28 bp, Homo Sapiens
ggtgagcactctggactctgaatccagc

SEQ ID NO: 38702 - DNA, 33 bp, Homo Sapiens; identical to SEQ ID NO: 19495

SEQ ID NO: 38703 - DNA, 34 bp, Homo Sapiens; identical to SEQ ID NO: 19496

SEQ ID NO: 38704 - DNA, 36 bp, Homo Sapiens; identical to SEQ ID NO: 19497

SEQ ID NO: 38705 - DNA, 37 bp, Homo Sapiens; identical to SEQ ID NO: 19498

SEQ ID NO: 38706 - DNA, 24 bp, Homo Sapiens
ggtgcagtggtagaattctcgcct

SEQ ID NO: 38707 - DNA, 16 bp, Homo Sapiens
ggtgcgagaggtcccg

SEQ ID NO: 38708 - DNA, 38 bp, Homo Sapiens; identical to SEQ ID NO: 19528

SEQ ID NO: 38709 - DNA, 39 bp, Homo Sapiens; identical to SEQ ID NO: 19529

SEQ ID NO: 38710 - DNA, 40 bp, Homo Sapiens; identical to SEQ ID NO: 19530

SEQ ID NO: 38711 - DNA, 41 bp, Homo Sapiens; identical to SEQ ID NO: 19531

SEQ ID NO: 38712 - DNA, 35 bp, Homo Sapiens; identical to SEQ ID NO: 19547

SEQ ID NO: 38713 - DNA, 36 bp, Homo Sapiens; identical to SEQ ID NO: 19548

SEQ ID NO: 38714 - DNA, 37 bp, Homo Sapiens; identical to SEQ ID NO: 19549

SEQ ID NO: 38715 - DNA, 38 bp, Homo Sapiens; identical to SEQ ID NO: 19550

SEQ ID NO: 38716 - DNA, 16 bp, Homo Sapiens
ggtggagcatgggact

SEQ ID NO: 38717 - DNA, 17 bp, Homo Sapiens
ggtggagcatgggactc

SEQ ID NO: 38718 - DNA, 27 bp, Homo Sapiens
ggtggagttaaagactttttctctgac

SEQ ID NO: 38719 - DNA, 28 bp, Homo Sapiens
ggtggagttaaagactttttctctgacc

SEQ ID NO: 38720 - DNA, 31 bp, Homo Sapiens
ggtggcccgggttcgactcccggtatgggaa

SEQ ID NO: 38721 - DNA, 32 bp, Homo Sapiens
ggtggcccgggttcgactcccggtatgggaac

SEQ ID NO: 38722 - DNA, 33 bp, Homo Sapiens; identical to SEQ ID NO: 19576

SEQ ID NO: 38723 - DNA, 21 bp, Homo Sapiens
ggtggtctagtggttaggatt

SEQ ID NO: 38724 - DNA, 27 bp, Homo Sapiens
ggtggtctagtggttaggattcggcgc

SEQ ID NO: 38725 - DNA, 28 bp, Homo Sapiens
ggtggtctagtggttaggattcggcgct

SEQ ID NO: 38726 - DNA, 29 bp, Homo Sapiens
ggtggtctagtggttaggattcggcgctc

SEQ ID NO: 38727 - DNA, 46 bp, Homo Sapiens
ggtggtctagtggttaggattcggcgctctcaccgccgcggcccgg

SEQ ID NO: 38728 - DNA, 25 bp, Homo Sapiens
ggtggttcagtggtagaattctcgc

SEQ ID NO: 38729 - DNA, 26 bp, Homo Sapiens
ggtggttcagtggtagaattctcgcc

SEQ ID NO: 38730 - DNA, 27 bp, Homo Sapiens
ggtggttcagtggtagaattctcgcct

SEQ ID NO: 38731 - DNA, 29 bp, Homo Sapiens
ggtggttcagtggtagaattctcgcctgc

SEQ ID NO: 38732 - DNA, 30 bp, Homo Sapiens; identical to SEQ ID NO: 19619

SEQ ID NO: 38733 - DNA, 43 bp, Homo Sapiens; identical to SEQ ID NO: 19625

SEQ ID NO: 38734 - DNA, 45 bp, Homo Sapiens; identical to SEQ ID NO: 19626

SEQ ID NO: 38735 - DNA, 27 bp, Homo Sapiens
ggtggttcgagcccacccagggacgcc

SEQ ID NO: 38736 - DNA, 23 bp, Homo Sapiens
ggtgtaatggttagcactctgga

SEQ ID NO: 38737 - DNA, 25 bp, Homo Sapiens
ggtgtaatggttagcactctggact

SEQ ID NO: 38738 - DNA, 26 bp, Homo Sapiens
ggtgtaatggttagcactctggactc

SEQ ID NO: 38739 - DNA, 27 bp, Homo Sapiens
ggtgtaatggttagcactctggactct

SEQ ID NO: 38740 - DNA, 28 bp, Homo Sapiens
ggtgtaatggttagcactctggactctg

SEQ ID NO: 38741 - DNA, 31 bp, Homo Sapiens
ggtgtaatggttagcactctggactctgaat

SEQ ID NO: 38742 - DNA, 32 bp, Homo Sapiens; identical to SEQ ID NO: 19642

SEQ ID NO: 38743 - DNA, 33 bp, Homo Sapiens; identical to SEQ ID NO: 19643

SEQ ID NO: 38744 - DNA, 44 bp, Homo Sapiens; identical to SEQ ID NO: 19645

SEQ ID NO: 38745 - DNA, 45 bp, Homo Sapiens; identical to SEQ ID NO: 19646

SEQ ID NO: 38746 - DNA, 46 bp, Homo Sapiens; identical to SEQ ID NO: 19647

SEQ ID NO: 38747 - DNA, 45 bp, Homo Sapiens
ggtgtaatggttagcactctggactttgaatccagcgatccgagt

SEQ ID NO: 38748 - DNA, 17 bp, Homo Sapiens
ggtgtagtggtatcatg

SEQ ID NO: 38749 - DNA, 19 bp, Homo Sapiens
ggtgtagtggtatcatgca

SEQ ID NO: 38750 - DNA, 24 bp, Homo Sapiens
ggtgtagtggtatcatgcaagatt

SEQ ID NO: 38751 - DNA, 16 bp, Homo Sapiens
ggttaaggcattggac

SEQ ID NO: 38752 - DNA, 16 bp, Homo Sapiens
ggttaaggcgttggac

SEQ ID NO: 38753 - DNA, 16 bp, Homo Sapiens
ggttagcactctggac

SEQ ID NO: 38754 - DNA, 17 bp, Homo Sapiens
ggttagcactctggact

SEQ ID NO: 38755 - DNA, 18 bp, Homo Sapiens
ggttagcactctggactc

SEQ ID NO: 38756 - DNA, 19 bp, Homo Sapiens
ggttagcactctggactct

SEQ ID NO: 38757 - DNA, 20 bp, Homo Sapiens
ggttagcactctggactctg

SEQ ID NO: 38758 - DNA, 21 bp, Homo Sapiens
ggttagcactctggactctga

SEQ ID NO: 38759 - DNA, 22 bp, Homo Sapiens
ggttagcactctggactctgaa

SEQ ID NO: 38760 - DNA, 23 bp, Homo Sapiens
ggttagcactctggactctgaat

SEQ ID NO: 38761 - DNA, 24 bp, Homo Sapiens
ggttagcactctggactctgaatc

SEQ ID NO: 38762 - DNA, 25 bp, Homo Sapiens
ggttagcactctggactctgaatcc

SEQ ID NO: 38763 - DNA, 26 bp, Homo Sapiens
ggttagcactctggactctgaatcca

SEQ ID NO: 38764 - DNA, 27 bp, Homo Sapiens
ggttagcactctggactctgaatccag

SEQ ID NO: 38765 - DNA, 28 bp, Homo Sapiens
ggttagcactctggactctgaatccagc

SEQ ID NO: 38766 - DNA, 29 bp, Homo Sapiens
ggttagcactctggactctgaatccagcg

SEQ ID NO: 38767 - DNA, 32 bp, Homo Sapiens; identical to SEQ ID NO: 19694

SEQ ID NO: 38768 - DNA, 33 bp, Homo Sapiens; identical to SEQ ID NO: 19695

SEQ ID NO: 38769 - DNA, 34 bp, Homo Sapiens; identical to SEQ ID NO: 19696

SEQ ID NO: 38770 - DNA, 35 bp, Homo Sapiens; identical to SEQ ID NO: 19697

SEQ ID NO: 38771 - DNA, 36 bp, Homo Sapiens; identical to SEQ ID NO: 19698

SEQ ID NO: 38772 - DNA, 37 bp, Homo Sapiens; identical to SEQ ID NO: 19699

SEQ ID NO: 38773 - DNA, 38 bp, Homo Sapiens; identical to SEQ ID NO: 19700

SEQ ID NO: 38774 - DNA, 39 bp, Homo Sapiens; identical to SEQ ID NO: 19701

SEQ ID NO: 38775 - DNA, 40 bp, Homo Sapiens; identical to SEQ ID NO: 19702

SEQ ID NO: 38776 - DNA, 22 bp, Homo Sapiens
ggttagcactctggactttgaa

SEQ ID NO: 38777 - DNA, 23 bp, Homo Sapiens
ggttagcactctggactttgaat

SEQ ID NO: 38778 - DNA, 24 bp, Homo Sapiens
ggttagcactctggactttgaatc

SEQ ID NO: 38779 - DNA, 25 bp, Homo Sapiens
ggttagcactctggactttgaatcc

SEQ ID NO: 38780 - DNA, 28 bp, Homo Sapiens
ggttagcactctggactttgaatccagc

SEQ ID NO: 38781 - DNA, 36 bp, Homo Sapiens; identical to SEQ ID NO: 19717

SEQ ID NO: 38782 - DNA, 37 bp, Homo Sapiens; identical to SEQ ID NO: 19718

SEQ ID NO: 38783 - DNA, 39 bp, Homo Sapiens
ggttagcactctggactttgaatccagcgatccgagttc

SEQ ID NO: 38784 - DNA, 16 bp, Homo Sapiens
ggttagcgcgcggtac

SEQ ID NO: 38785 - DNA, 23 bp, Homo Sapiens
ggttagcgcgttcggctgttaac

SEQ ID NO: 38786 - DNA, 16 bp, Homo Sapiens
ggttagctcagtcggc

SEQ ID NO: 38787 - DNA, 16 bp, Homo Sapiens
ggttaggattcctggt

SEQ ID NO: 38788 - DNA, 17 bp, Homo Sapiens
ggttaggattcctggtt

SEQ ID NO: 38789 - DNA, 19 bp, Homo Sapiens
ggttaggattcctggtttt

SEQ ID NO: 38790 - DNA, 29 bp, Homo Sapiens
ggttaggattcctggttttcacccaggtg

SEQ ID NO: 38791 - DNA, 16 bp, Homo Sapiens
ggttaggattcggcgc

SEQ ID NO: 38792 - DNA, 17 bp, Homo Sapiens
ggttaggattcggcgct

SEQ ID NO: 38793 - DNA, 18 bp, Homo Sapiens
ggttaggattcggcgctc

SEQ ID NO: 38794 - DNA, 19 bp, Homo Sapiens
ggttaggattcggcgctct

SEQ ID NO: 38795 - DNA, 20 bp, Homo Sapiens
ggttaggattcggcgctctc

SEQ ID NO: 38796 - DNA, 21 bp, Homo Sapiens
ggttaggattcggcgctctca

SEQ ID NO: 38797 - DNA, 23 bp, Homo Sapiens
ggttaggattcggcgctctcacc

SEQ ID NO: 38798 - DNA, 24 bp, Homo Sapiens
ggttaggattcggcgctctcaccg

SEQ ID NO: 38799 - DNA, 26 bp, Homo Sapiens
ggttaggattcggcgctctcaccgcc

SEQ ID NO: 38800 - DNA, 31 bp, Homo Sapiens
ggttaggattcggcgctctcaccgccgcggc

SEQ ID NO: 38801 - DNA, 33 bp, Homo Sapiens; identical to SEQ ID NO: 19757

SEQ ID NO: 38802 - DNA, 36 bp, Homo Sapiens; identical to SEQ ID NO: 19760

SEQ ID NO: 38803 - DNA, 16 bp, Homo Sapiens
ggttagtactctgcgt

SEQ ID NO: 38804 - DNA, 17 bp, Homo Sapiens
ggttagtactctgcgtt

SEQ ID NO: 38805 - DNA, 18 bp, Homo Sapiens
ggttagtactctgcgttg

SEQ ID NO: 38806 - DNA, 19 bp, Homo Sapiens
ggttagtactctgcgttgt

SEQ ID NO: 38807 - DNA, 23 bp, Homo Sapiens
ggttagtactctgcgttgtggcc

SEQ ID NO: 38808 - DNA, 28 bp, Homo Sapiens
ggttagtactctgcgttgtggccgcagc

SEQ ID NO: 38809 - DNA, 33 bp, Homo Sapiens; identical to SEQ ID NO: 19778

SEQ ID NO: 38810 - DNA, 24 bp, Homo Sapiens
ggttatacccttcccgtactacca

SEQ ID NO: 38811 - DNA, 16 bp, Homo Sapiens
ggttatcacgtctgct

SEQ ID NO: 38812 - DNA, 17 bp, Homo Sapiens
ggttatcacgtctgctt

SEQ ID NO: 38813 - DNA, 18 bp, Homo Sapiens
ggttatcacgtctgcttt

SEQ ID NO: 38814 - DNA, 16 bp, Homo Sapiens
ggttatcacgttcgcc

SEQ ID NO: 38815 - DNA, 17 bp, Homo Sapiens
ggttatcacgttcgcct

SEQ ID NO: 38816 - DNA, 16 bp, Homo Sapiens
ggttcaaatcccggac

SEQ ID NO: 38817 - DNA, 17 bp, Homo Sapiens
ggttcaaatcccggacg

SEQ ID NO: 38818 - DNA, 19 bp, Homo Sapiens
ggttcaaatcccggacgag

SEQ ID NO: 38819 - DNA, 20 bp, Homo Sapiens
ggttcaaatcccggacgagc

SEQ ID NO: 38820 - DNA, 22 bp, Homo Sapiens
ggttcaaatcccggacgagccc

SEQ ID NO: 38821 - DNA, 23 bp, Homo Sapiens
ggttcaaatcccggacgagcccc

SEQ ID NO: 38822 - DNA, 24 bp, Homo Sapiens
ggttcaaatcccggacgagccccc

SEQ ID NO: 38823 - DNA, 16 bp, Homo Sapiens
ggttcaaatccgggtg

SEQ ID NO: 38824 - DNA, 17 bp, Homo Sapiens
ggttcaaatccgggtgc

SEQ ID NO: 38825 - DNA, 18 bp, Homo Sapiens
ggttcaaatccgggtgcc

SEQ ID NO: 38826 - DNA, 19 bp, Homo Sapiens
ggttcaaatccgggtgccc

SEQ ID NO: 38827 - DNA, 21 bp, Homo Sapiens
ggttcaaatccgggtgccccc

SEQ ID NO: 38828 - DNA, 22 bp, Homo Sapiens
ggttcaaatccgggtgccccct

SEQ ID NO: 38829 - DNA, 24 bp, Homo Sapiens
ggttcaaatccgggtgccccctcc

SEQ ID NO: 38830 - DNA, 21 bp, Homo Sapiens
ggttcaagtccctgttcgggc

SEQ ID NO: 38831 - DNA, 22 bp, Homo Sapiens
ggttcaagtccctgttcgggcg

SEQ ID NO: 38832 - DNA, 23 bp, Homo Sapiens
ggttcaagtccctgttcgggcgc

SEQ ID NO: 38833 - DNA, 24 bp, Homo Sapiens
ggttcaagtccctgttcgggcgcc

SEQ ID NO: 38834 - DNA, 16 bp, Homo Sapiens
ggttcaatccccggca

SEQ ID NO: 38835 - DNA, 24 bp, Homo Sapiens
ggttcaatccccggcacctccacc

SEQ ID NO: 38836 - DNA, 23 bp, Homo Sapiens
ggttcaatcccgggtttcggcac

SEQ ID NO: 38837 - DNA, 23 bp, Homo Sapiens
ggttcaattccccgacggggagc

SEQ ID NO: 38838 - DNA, 24 bp, Homo Sapiens
ggttcaattccccgacggggagcc

SEQ ID NO: 38839 - DNA, 25 bp, Homo Sapiens
ggttcaattccccgacggggagcca

SEQ ID NO: 38840 - DNA, 22 bp, Homo Sapiens
ggttcagtggtagaattctcgc

SEQ ID NO: 38841 - DNA, 23 bp, Homo Sapiens
ggttcagtggtagaattctcgcc

SEQ ID NO: 38842 - DNA, 24 bp, Homo Sapiens
ggttcagtggtagaattctcgcct

SEQ ID NO: 38843 - DNA, 26 bp, Homo Sapiens
ggttcagtggtagaattctcgcctgc

SEQ ID NO: 38844 - DNA, 27 bp, Homo Sapiens
ggttcagtggtagaattctcgcctgcc

SEQ ID NO: 38845 - DNA, 29 bp, Homo Sapiens
ggttcagtggtagaattctcgcctgccac

SEQ ID NO: 38846 - DNA, 30 bp, Homo Sapiens; identical to SEQ ID NO: 19851

SEQ ID NO: 38847 - DNA, 40 bp, Homo Sapiens; identical to SEQ ID NO: 19853

SEQ ID NO: 38848 - DNA, 41 bp, Homo Sapiens
ggttcagtggtagaattctcgcctgccacgcgggaggcccg

SEQ ID NO: 38849 - DNA, 42 bp, Homo Sapiens; identical to SEQ ID NO: 19854

SEQ ID NO: 38850 - DNA, 16 bp, Homo Sapiens
ggttccatagtgtagc

SEQ ID NO: 38851 - DNA, 17 bp, Homo Sapiens
ggttccatagtgtagcg

SEQ ID NO: 38852 - DNA, 19 bp, Homo Sapiens
ggttccatagtgtagcggt

SEQ ID NO: 38853 - DNA, 23 bp, Homo Sapiens
ggttccatagtgtagcggttatc

SEQ ID NO: 38854 - DNA, 28 bp, Homo Sapiens
ggttccatagtgtagcggttatcacgtc

SEQ ID NO: 38855 - DNA, 30 bp, Homo Sapiens; identical to SEQ ID NO: 19863

SEQ ID NO: 38856 - DNA, 31 bp, Homo Sapiens; identical to SEQ ID NO: 19864

SEQ ID NO: 38857 - DNA, 32 bp, Homo Sapiens; identical to SEQ ID NO: 19865

SEQ ID NO: 38858 - DNA, 33 bp, Homo Sapiens; identical to SEQ ID NO: 19866

SEQ ID NO: 38859 - DNA, 34 bp, Homo Sapiens; identical to SEQ ID NO: 19867

SEQ ID NO: 38860 - DNA, 16 bp, Homo Sapiens
ggttccatagtgtagt

SEQ ID NO: 38861 - DNA, 17 bp, Homo Sapiens
ggttccatagtgtagtg

SEQ ID NO: 38862 - DNA, 18 bp, Homo Sapiens
ggttccatagtgtagtgg

SEQ ID NO: 38863 - DNA, 19 bp, Homo Sapiens
ggttccatagtgtagtggt

SEQ ID NO: 38864 - DNA, 23 bp, Homo Sapiens
ggttccatagtgtagtggttatc

SEQ ID NO: 38865 - DNA, 25 bp, Homo Sapiens
ggttccatagtgtagtggttatcac

SEQ ID NO: 38866 - DNA, 31 bp, Homo Sapiens; identical to SEQ ID NO: 19882

SEQ ID NO: 38867 - DNA, 32 bp, Homo Sapiens; identical to SEQ ID NO: 19883

SEQ ID NO: 38868 - DNA, 33 bp, Homo Sapiens; identical to SEQ ID NO: 19884

SEQ ID NO: 38869 - DNA, 34 bp, Homo Sapiens; identical to SEQ ID NO: 19885

SEQ ID NO: 38870 - DNA, 26 bp, Homo Sapiens
ggttccatagtgtagtggttatcacg

SEQ ID NO: 38871 - DNA, 28 bp, Homo Sapiens
ggttccatagtgtagtggttatcacgtc

SEQ ID NO: 38872 - DNA, 29 bp, Homo Sapiens
ggttccatagtgtagtggttatcacgtct

SEQ ID NO: 38873 - DNA, 30 bp, Homo Sapiens; identical to SEQ ID NO: 19892

SEQ ID NO: 38874 - DNA, 31 bp, Homo Sapiens; identical to SEQ ID NO: 19893

SEQ ID NO: 38875 - DNA, 32 bp, Homo Sapiens; identical to SEQ ID NO: 19894

SEQ ID NO: 38876 - DNA, 33 bp, Homo Sapiens; identical to SEQ ID NO: 19895

SEQ ID NO: 38877 - DNA, 34 bp, Homo Sapiens; identical to SEQ ID NO: 19896

SEQ ID NO: 38878 - DNA, 35 bp, Homo Sapiens; identical to SEQ ID NO: 19897

SEQ ID NO: 38879 - DNA, 16 bp, Homo Sapiens
ggttccatggtgtaat

SEQ ID NO: 38880 - DNA, 17 bp, Homo Sapiens
ggttccatggtgtaatg

SEQ ID NO: 38881 - DNA, 19 bp, Homo Sapiens
ggttccatggtgtaatggt

SEQ ID NO: 38882 - DNA, 33 bp, Homo Sapiens; identical to SEQ ID NO: 19910

SEQ ID NO: 38883 - DNA, 32 bp, Homo Sapiens; identical to SEQ ID NO: 19919

SEQ ID NO: 38884 - DNA, 33 bp, Homo Sapiens; identical to SEQ ID NO: 19920

SEQ ID NO: 38885 - DNA, 34 bp, Homo Sapiens; identical to SEQ ID NO: 19921

SEQ ID NO: 38886 - DNA, 35 bp, Homo Sapiens; identical to SEQ ID NO: 19922

SEQ ID NO: 38887 - DNA, 23 bp, Homo Sapiens
ggttccatggtgtaatggttagc

SEQ ID NO: 38888 - DNA, 26 bp, Homo Sapiens
ggttccatggtgtaatggttagcact

SEQ ID NO: 38889 - DNA, 27 bp, Homo Sapiens
ggttccatggtgtaatggttagcactc

SEQ ID NO: 38890 - DNA, 28 bp, Homo Sapiens
ggttccatggtgtaatggttagcactct

SEQ ID NO: 38891 - DNA, 29 bp, Homo Sapiens
ggttccatggtgtaatggttagcactctg

SEQ ID NO: 38892 - DNA, 30 bp, Homo Sapiens; identical to SEQ ID NO: 19931

SEQ ID NO: 38893 - DNA, 31 bp, Homo Sapiens; identical to SEQ ID NO: 19932

SEQ ID NO: 38894 - DNA, 32 bp, Homo Sapiens; identical to SEQ ID NO: 19933

SEQ ID NO: 38895 - DNA, 33 bp, Homo Sapiens; identical to SEQ ID NO: 19934

SEQ ID NO: 38896 - DNA, 34 bp, Homo Sapiens; identical to SEQ ID NO: 19935

SEQ ID NO: 38897 - DNA, 35 bp, Homo Sapiens; identical to SEQ ID NO: 19936

SEQ ID NO: 38898 - DNA, 36 bp, Homo Sapiens; identical to SEQ ID NO: 19937

SEQ ID NO: 38899 - DNA, 37 bp, Homo Sapiens; identical to SEQ ID NO: 19938

SEQ ID NO: 38900 - DNA, 38 bp, Homo Sapiens; identical to SEQ ID NO: 19939

SEQ ID NO: 38901 - DNA, 39 bp, Homo Sapiens; identical to SEQ ID NO: 19940

SEQ ID NO: 38902 - DNA, 40 bp, Homo Sapiens; identical to SEQ ID NO: 19941

SEQ ID NO: 38903 - DNA, 41 bp, Homo Sapiens; identical to SEQ ID NO: 19942

SEQ ID NO: 38904 - DNA, 42 bp, Homo Sapiens; identical to SEQ ID NO: 19943

SEQ ID NO: 38905 - DNA, 43 bp, Homo Sapiens
ggttccatggtgtaatggttagcactctggactctgaatccag

SEQ ID NO: 38906 - DNA, 44 bp, Homo Sapiens; identical to SEQ ID NO: 19944

SEQ ID NO: 38907 - DNA, 45 bp, Homo Sapiens; identical to SEQ ID NO: 19945

SEQ ID NO: 38908 - DNA, 46 bp, Homo Sapiens; identical to SEQ ID NO: 19946

SEQ ID NO: 38909 - DNA, 47 bp, Homo Sapiens; identical to SEQ ID NO: 19947

SEQ ID NO: 38910 - DNA, 19 bp, Homo Sapiens
ggttccgggttcgagtccc

SEQ ID NO: 38911 - DNA, 28 bp, Homo Sapiens
ggttccgggttcgagtcccggcggagtc

SEQ ID NO: 38912 - DNA, 30 bp, Homo Sapiens; identical to SEQ ID NO: 19950

SEQ ID NO: 38913 - DNA, 31 bp, Homo Sapiens; identical to SEQ ID NO: 19951

SEQ ID NO: 38914 - DNA, 16 bp, Homo Sapiens
ggttcgaaaccgggcg

SEQ ID NO: 38915 - DNA, 17 bp, Homo Sapiens
ggttcgaaaccgggcgg

SEQ ID NO: 38916 - DNA, 18 bp, Homo Sapiens
ggttcgaaaccgggcgga

SEQ ID NO: 38917 - DNA, 19 bp, Homo Sapiens
ggttcgaaaccgggcggaa

SEQ ID NO: 38918 - DNA, 21 bp, Homo Sapiens
ggttcgaaaccgggcggaaac

SEQ ID NO: 38919 - DNA, 22 bp, Homo Sapiens
ggttcgaaaccgggcggaaaca

SEQ ID NO: 38920 - DNA, 23 bp, Homo Sapiens
ggttcgaaaccgggcggaaacac

SEQ ID NO: 38921 - DNA, 24 bp, Homo Sapiens
ggttcgaaaccgggcggaaacacc

SEQ ID NO: 38922 - DNA, 22 bp, Homo Sapiens
ggttcgaaccccgtccgtgcct

SEQ ID NO: 38923 - DNA, 23 bp, Homo Sapiens
ggttcgaaccccgtccgtgcctc

SEQ ID NO: 38924 - DNA, 24 bp, Homo Sapiens
ggttcgaaccctgctcgctgcgcc

SEQ ID NO: 38925 - DNA, 22 bp, Homo Sapiens
ggttcgaatcccaccgctgcca

SEQ ID NO: 38926 - DNA, 24 bp, Homo Sapiens
ggttcgaatcccaccgctgccacc

SEQ ID NO: 38927 - DNA, 24 bp, Homo Sapiens
ggttcgaatcccaccttcgtcgcc

SEQ ID NO: 38928 - DNA, 23 bp, Homo Sapiens
ggttcgaatcccactcctgacac

SEQ ID NO: 38929 - DNA, 24 bp, Homo Sapiens
ggttcgaatcccactcctgacacc

SEQ ID NO: 38930 - DNA, 22 bp, Homo Sapiens
ggttcgaatcccacttctgaca

SEQ ID NO: 38931 - DNA, 24 bp, Homo Sapiens
ggttcgaatcccacttctgacacc

SEQ ID NO: 38932 - DNA, 24 bp, Homo Sapiens
ggttcgaatcccagcggggcctcc

SEQ ID NO: 38933 - DNA, 22 bp, Homo Sapiens
ggttcgaatcccagcggtgcct

SEQ ID NO: 38934 - DNA, 23 bp, Homo Sapiens
ggttcgaatcccagcggtgcctc

SEQ ID NO: 38935 - DNA, 24 bp, Homo Sapiens
ggttcgaatcccagcggtgcctcc

SEQ ID NO: 38936 - DNA, 23 bp, Homo Sapiens
ggttcgaatcccatcctcgtcgc

SEQ ID NO: 38937 - DNA, 24 bp, Homo Sapiens
ggttcgaatcccatcctcgtcgcc

SEQ ID NO: 38938 - DNA, 22 bp, Homo Sapiens
ggttcgaatcccttcgtggttg

SEQ ID NO: 38939 - DNA, 23 bp, Homo Sapiens
ggttcgaatcccttcgtggttgc

SEQ ID NO: 38940 - DNA, 24 bp, Homo Sapiens
ggttcgaatcccttcgtggttgcc

SEQ ID NO: 38941 - DNA, 21 bp, Homo Sapiens
ggttcgaatccgagtcacggc

SEQ ID NO: 38942 - DNA, 22 bp, Homo Sapiens
ggttcgaatccgagtcacggca

SEQ ID NO: 38943 - DNA, 23 bp, Homo Sapiens
ggttcgaatccgagtcacggcac

SEQ ID NO: 38944 - DNA, 22 bp, Homo Sapiens
ggttcgaatccggctcgaagga

SEQ ID NO: 38945 - DNA, 23 bp, Homo Sapiens
ggttcgaatccggctcgaaggac

SEQ ID NO: 38946 - DNA, 24 bp, Homo Sapiens
ggttcgaatccggctcgaaggacc

SEQ ID NO: 38947 - DNA, 23 bp, Homo Sapiens
ggttcgaatccggctcggaggac

SEQ ID NO: 38948 - DNA, 24 bp, Homo Sapiens
ggttcgaatccggctcggaggacc

SEQ ID NO: 38949 - DNA, 23 bp, Homo Sapiens
ggttcgaatcctgccgactacgc

SEQ ID NO: 38950 - DNA, 24 bp, Homo Sapiens
ggttcgaatcctgccgactacgcc

SEQ ID NO: 38951 - DNA, 24 bp, Homo Sapiens
ggttcgaatcctgctcacagcgcc

SEQ ID NO: 38952 - DNA, 22 bp, Homo Sapiens
ggttcgaatcctgttcgtgacg

SEQ ID NO: 38953 - DNA, 23 bp, Homo Sapiens
ggttcgaatcctgttcgtgacgc

SEQ ID NO: 38954 - DNA, 24 bp, Homo Sapiens
ggttcgaatcctgttcgtgacgcc

SEQ ID NO: 38955 - DNA, 21 bp, Homo Sapiens
ggttcgactcccggtatggga

SEQ ID NO: 38956 - DNA, 22 bp, Homo Sapiens
ggttcgactcccggtatgggaa

SEQ ID NO: 38957 - DNA, 23 bp, Homo Sapiens
ggttcgactcccggtatgggaac

SEQ ID NO: 38958 - DNA, 24 bp, Homo Sapiens
ggttcgactcccggtatgggaacc

SEQ ID NO: 38959 - DNA, 16 bp, Homo Sapiens
ggttcgactcccggtg

SEQ ID NO: 38960 - DNA, 18 bp, Homo Sapiens
ggttcgactcccggtgtg

SEQ ID NO: 38961 - DNA, 19 bp, Homo Sapiens
ggttcgactcccggtgtgg

SEQ ID NO: 38962 - DNA, 20 bp, Homo Sapiens
ggttcgactcccggtgtggg

SEQ ID NO: 38963 - DNA, 21 bp, Homo Sapiens
ggttcgactcccggtgtggga

SEQ ID NO: 38964 - DNA, 22 bp, Homo Sapiens
ggttcgactcccggtgtgggaa

SEQ ID NO: 38965 - DNA, 23 bp, Homo Sapiens
ggttcgactcccggtgtgggaac

SEQ ID NO: 38966 - DNA, 24 bp, Homo Sapiens
ggttcgactcccggtgtgggaacc

SEQ ID NO: 38967 - DNA, 23 bp, Homo Sapiens
ggttcgactcctggctggctcgc

SEQ ID NO: 38968 - DNA, 24 bp, Homo Sapiens
ggttcgactcctggctggctcgcc

SEQ ID NO: 38969 - DNA, 24 bp, Homo Sapiens
ggttcgagcccacccagggacgcc

SEQ ID NO: 38970 - DNA, 24 bp, Homo Sapiens
ggttcgagccccacgttgggcgcc

SEQ ID NO: 38971 - DNA, 17 bp, Homo Sapiens
ggttcgagtcccacctg

SEQ ID NO: 38972 - DNA, 24 bp, Homo Sapiens
ggttcgagtcccatctggggtgcc

SEQ ID NO: 38973 - DNA, 24 bp, Homo Sapiens
ggttcgagtcccatctgggtcgcc

SEQ ID NO: 38974 - DNA, 21 bp, Homo Sapiens
ggttcgagtcccggcggagtc

SEQ ID NO: 38975 - DNA, 23 bp, Homo Sapiens
ggttcgagtcccttcgtggtcgc

SEQ ID NO: 38976 - DNA, 24 bp, Homo Sapiens
ggttcgagtcccttcgtggtcgcc

SEQ ID NO: 38977 - DNA, 23 bp, Homo Sapiens
ggttcgagtcctgccgcggtcgc

SEQ ID NO: 38978 - DNA, 24 bp, Homo Sapiens
ggttcgagtcctgccgcggtcgcc

SEQ ID NO: 38979 - DNA, 22 bp, Homo Sapiens
ggttcgatccccagcatctcca

SEQ ID NO: 38980 - DNA, 23 bp, Homo Sapiens
ggttcgatccccagcatctccac

SEQ ID NO: 38981 - DNA, 24 bp, Homo Sapiens
ggttcgatccccagcatctccacc

SEQ ID NO: 38982 - DNA, 16 bp, Homo Sapiens
ggttcgatccccggca

SEQ ID NO: 38983 - DNA, 18 bp, Homo Sapiens
ggttcgatccccggcacc

SEQ ID NO: 38984 - DNA, 18 bp, Homo Sapiens
ggttcgatccccggcatc

SEQ ID NO: 38985 - DNA, 23 bp, Homo Sapiens
ggttcgatccccggcatctccac

SEQ ID NO: 38986 - DNA, 24 bp, Homo Sapiens
ggttcgatccccggcatctccacc

SEQ ID NO: 38987 - DNA, 20 bp, Homo Sapiens
ggttcgatccccgtacgggc

SEQ ID NO: 38988 - DNA, 22 bp, Homo Sapiens
ggttcgatcccgggtttcggca

SEQ ID NO: 38989 - DNA, 23 bp, Homo Sapiens
ggttcgatcccgggtttcggcac

SEQ ID NO: 38990 - DNA, 24 bp, Homo Sapiens
ggttcgatcccgggtttcggcacc

SEQ ID NO: 38991 - DNA, 20 bp, Homo Sapiens
ggttcgattccccgacgggg

SEQ ID NO: 38992 - DNA, 21 bp, Homo Sapiens
ggttcgattccccgacgggga

SEQ ID NO: 38993 - DNA, 22 bp, Homo Sapiens
ggttcgattccccgacggggag

SEQ ID NO: 38994 - DNA, 23 bp, Homo Sapiens
ggttcgattccccgacggggagc

SEQ ID NO: 38995 - DNA, 24 bp, Homo Sapiens
ggttcgattccccgacggggagcc

SEQ ID NO: 38996 - DNA, 25 bp, Homo Sapiens
ggttcgattccccgacggggagcca

SEQ ID NO: 38997 - DNA, 16 bp, Homo Sapiens
ggttcgattcccggcc

SEQ ID NO: 38998 - DNA, 24 bp, Homo Sapiens
ggttcgattcccggccaacgcacc

SEQ ID NO: 38999 - DNA, 24 bp, Homo Sapiens
ggttcgattcccggccaatgcacc

SEQ ID NO: 39000 - DNA, 16 bp, Homo Sapiens
ggttcgattcccgggc

SEQ ID NO: 39001 - DNA, 19 bp, Homo Sapiens
ggttcgattcccgggcggc

SEQ ID NO: 39002 - DNA, 21 bp, Homo Sapiens
ggttcgattcccgggcggcgc

SEQ ID NO: 39003 - DNA, 23 bp, Homo Sapiens
ggttcgattcccgggcggcgcac

SEQ ID NO: 39004 - DNA, 16 bp, Homo Sapiens
ggttcgattcccggtc

SEQ ID NO: 39005 - DNA, 18 bp, Homo Sapiens
ggttcgattcccggtcag

SEQ ID NO: 39006 - DNA, 19 bp, Homo Sapiens
ggttcgattcccggtcagg

SEQ ID NO: 39007 - DNA, 20 bp, Homo Sapiens
ggttcgattcccggtcaggg

SEQ ID NO: 39008 - DNA, 21 bp, Homo Sapiens
ggttcgattcccggtcaggga

SEQ ID NO: 39009 - DNA, 22 bp, Homo Sapiens
ggttcgattcccggtcagggaa

SEQ ID NO: 39010 - DNA, 23 bp, Homo Sapiens
ggttcgattcccggtcagggaac

SEQ ID NO: 39011 - DNA, 24 bp, Homo Sapiens
ggttcgattcccggtcagggaacc

SEQ ID NO: 39012 - DNA, 25 bp, Homo Sapiens
ggttcgattcccggtcagggaacca

SEQ ID NO: 39013 - DNA, 23 bp, Homo Sapiens
ggttcgattcccggtcatggaac

SEQ ID NO: 39014 - DNA, 23 bp, Homo Sapiens
ggttcgattccggctcgaaggac

SEQ ID NO: 39015 - DNA, 24 bp, Homo Sapiens
ggttcgattccggctcgaaggacc

SEQ ID NO: 39016 - DNA, 23 bp, Homo Sapiens
ggttcgattcctggtcagggaac

SEQ ID NO: 39017 - DNA, 25 bp, Homo Sapiens
ggttcgattccttccttttttgcca

SEQ ID NO: 39018 - DNA, 22 bp, Homo Sapiens
ggttcgattctcatagtcctag

SEQ ID NO: 39019 - DNA, 23 bp, Homo Sapiens
ggttcgattctcatagtcctagc

SEQ ID NO: 39020 - DNA, 31 bp, Homo Sapiens; identical to SEQ ID NO: 20118

SEQ ID NO: 39021 - DNA, 21 bp, Homo Sapiens
ggttgtagtccgtgcgagaat

SEQ ID NO: 39022 - DNA, 22 bp, Homo Sapiens
ggttgtagtccgtgcgagaata

SEQ ID NO: 39023 - DNA, 24 bp, Homo Sapiens
ggttgtagtccgtgcgagaatacc

SEQ ID NO: 39024 - DNA, 25 bp, Homo Sapiens
ggttgtagtccgtgcgagaatacca

SEQ ID NO: 39025 - DNA, 17 bp, Homo Sapiens
ggttgtgagttcgagcc

SEQ ID NO: 39026 - DNA, 31 bp, Homo Sapiens; identical to SEQ ID NO: 20134

SEQ ID NO: 39027 - DNA, 31 bp, Homo Sapiens
ggttgtgggttcgagtcccaccagagtcgcc

SEQ ID NO: 39028 - DNA, 24 bp, Homo Sapiens
ggtttaagtcccattggtctagcc

SEQ ID NO: 39029 - DNA, 38 bp, Homo Sapiens
ggtttccccgcgcaggttcgaatcctgccgactacgcc

SEQ ID NO: 39030 - DNA, 34 bp, Homo Sapiens; identical to SEQ ID NO: 20146

SEQ ID NO: 39031 - DNA, 33 bp, Homo Sapiens; identical to SEQ ID NO: 20153

SEQ ID NO: 39032 - DNA, 34 bp, Homo Sapiens; identical to SEQ ID NO: 20154

SEQ ID NO: 39033 - DNA, 44 bp, Homo Sapiens; identical to SEQ ID NO: 20164

SEQ ID NO: 39034 - DNA, 20 bp, Homo Sapiens
ggtttttcatatcattggtc

SEQ ID NO: 39035 - DNA, 21 bp, Homo Sapiens
ggtttttcatatcattggtcg

SEQ ID NO: 39036 - DNA, 26 bp, Homo Sapiens
ggtttttcatatcattggtcgtggtt

SEQ ID NO: 39037 - DNA, 27 bp, Homo Sapiens
ggtttttcatatcattggtcgtggttg

SEQ ID NO: 39038 - DNA, 29 bp, Homo Sapiens
ggtttttcatatcattggtcgtggttgta

SEQ ID NO: 39039 - DNA, 32 bp, Homo Sapiens; identical to SEQ ID NO: 20185

SEQ ID NO: 39040 - DNA, 33 bp, Homo Sapiens; identical to SEQ ID NO: 20186

SEQ ID NO: 39041 - DNA, 34 bp, Homo Sapiens; identical to SEQ ID NO: 20187

SEQ ID NO: 39042 - DNA, 36 bp, Homo Sapiens; identical to SEQ ID NO: 20189

SEQ ID NO: 39043 - DNA, 37 bp, Homo Sapiens; identical to SEQ ID NO: 20190

SEQ ID NO: 39044 - DNA, 38 bp, Homo Sapiens; identical to SEQ ID NO: 20191

SEQ ID NO: 39045 - DNA, 39 bp, Homo Sapiens; identical to SEQ ID NO: 20192

SEQ ID NO: 39046 - DNA, 40 bp, Homo Sapiens; identical to SEQ ID NO: 20193

SEQ ID NO: 39047 - DNA, 41 bp, Homo Sapiens; identical to SEQ ID NO: 20194

SEQ ID NO: 39048 - DNA, 42 bp, Homo Sapiens; identical to SEQ ID NO: 20195

SEQ ID NO: 39049 - DNA, 43 bp, Homo Sapiens; identical to SEQ ID NO: 20196

SEQ ID NO: 39050 - DNA, 44 bp, Homo Sapiens; identical to SEQ ID NO: 20197

SEQ ID NO: 39051 - DNA, 45 bp, Homo Sapiens; identical to SEQ ID NO: 20198

SEQ ID NO: 39052 - DNA, 46 bp, Homo Sapiens; identical to SEQ ID NO: 20199

SEQ ID NO: 39053 - DNA, 47 bp, Homo Sapiens; identical to SEQ ID NO: 20200

SEQ ID NO: 39054 - DNA, 22 bp, Homo Sapiens
gtaaacaggagatcctgggttc

SEQ ID NO: 39055 - DNA, 23 bp, Homo Sapiens
gtaaacaggagatcctgggttcg

SEQ ID NO: 39056 - DNA, 39 bp, Homo Sapiens; identical to SEQ ID NO: 20209

SEQ ID NO: 39057 - DNA, 40 bp, Homo Sapiens; identical to SEQ ID NO: 20210

SEQ ID NO: 39058 - DNA, 41 bp, Homo Sapiens; identical to SEQ ID NO: 20211

SEQ ID NO: 39059 - DNA, 39 bp, Homo Sapiens; identical to SEQ ID NO: 20214

SEQ ID NO: 39060 - DNA, 40 bp, Homo Sapiens; identical to SEQ ID NO: 20215

SEQ ID NO: 39061 - DNA, 41 bp, Homo Sapiens; identical to SEQ ID NO: 20216

SEQ ID NO: 39062 - DNA, 17 bp, Homo Sapiens
gtaaaccaggggtcgcg

SEQ ID NO: 39063 - DNA, 18 bp, Homo Sapiens
gtaaaccaggggtcgcga

SEQ ID NO: 39064 - DNA, 20 bp, Homo Sapiens
gtaaaccgaagatcacgggt

SEQ ID NO: 39065 - DNA, 16 bp, Homo Sapiens
gtaaaccgaagatcgc

SEQ ID NO: 39066 - DNA, 20 bp, Homo Sapiens
gtaaaccgaagatcgcgggt

SEQ ID NO: 39067 - DNA, 21 bp, Homo Sapiens
gtaaaccgaagatcgcgggtt

SEQ ID NO: 39068 - DNA, 19 bp, Homo Sapiens
gtaaaccggagatgaaaac

SEQ ID NO: 39069 - DNA, 33 bp, Homo Sapiens; identical to SEQ ID NO: 20240

SEQ ID NO: 39070 - DNA, 36 bp, Homo Sapiens; identical to SEQ ID NO: 20243

SEQ ID NO: 39071 - DNA, 37 bp, Homo Sapiens; identical to SEQ ID NO: 20244

SEQ ID NO: 39072 - DNA, 29 bp, Homo Sapiens
gtaaggtcagctaaataagctatcgggcc

SEQ ID NO: 39073 - DNA, 30 bp, Homo Sapiens; identical to SEQ ID NO: 20279

SEQ ID NO: 39074 - DNA, 31 bp, Homo Sapiens; identical to SEQ ID NO: 20280

SEQ ID NO: 39075 - DNA, 16 bp, Homo Sapiens
gtaatggttagcactc

SEQ ID NO: 39076 - DNA, 18 bp, Homo Sapiens
gtaatggttagcactctg

SEQ ID NO: 39077 - DNA, 19 bp, Homo Sapiens
gtaatggttagcactctgg

SEQ ID NO: 39078 - DNA, 20 bp, Homo Sapiens
gtaatggttagcactctgga

SEQ ID NO: 39079 - DNA, 21 bp, Homo Sapiens
gtaatggttagcactctggac

SEQ ID NO: 39080 - DNA, 22 bp, Homo Sapiens
gtaatggttagcactctggact

SEQ ID NO: 39081 - DNA, 23 bp, Homo Sapiens
gtaatggttagcactctggactc

SEQ ID NO: 39082 - DNA, 24 bp, Homo Sapiens
gtaatggttagcactctggactct

SEQ ID NO: 39083 - DNA, 25 bp, Homo Sapiens
gtaatggttagcactctggactctg

SEQ ID NO: 39084 - DNA, 27 bp, Homo Sapiens
gtaatggttagcactctggactctgaa

SEQ ID NO: 39085 - DNA, 28 bp, Homo Sapiens
gtaatggttagcactctggactctgaat

SEQ ID NO: 39086 - DNA, 29 bp, Homo Sapiens
gtaatggttagcactctggactctgaatc

SEQ ID NO: 39087 - DNA, 30 bp, Homo Sapiens; identical to SEQ ID NO: 20328

SEQ ID NO: 39088 - DNA, 32 bp, Homo Sapiens
gtaatggttagcactctggactctgaatccag

SEQ ID NO: 39089 - DNA, 34 bp, Homo Sapiens; identical to SEQ ID NO: 20329

SEQ ID NO: 39090 - DNA, 41 bp, Homo Sapiens; identical to SEQ ID NO: 20330

SEQ ID NO: 39091 - DNA, 29 bp, Homo Sapiens
gtaatggttagcactctggactttgaatc

SEQ ID NO: 39092 - DNA, 19 bp, Homo Sapiens
gtactctgcgttgtggccg

SEQ ID NO: 39093 - DNA, 21 bp, Homo Sapiens
gtagaattctcgcctcccacg

SEQ ID NO: 39094 - DNA, 24 bp, Homo Sapiens
gtagaattctcgcctcccacgcgg

SEQ ID NO: 39095 - DNA, 33 bp, Homo Sapiens; identical to SEQ ID NO: 20345

SEQ ID NO: 39096 - DNA, 34 bp, Homo Sapiens; identical to SEQ ID NO: 20346

SEQ ID NO: 39097 - DNA, 36 bp, Homo Sapiens; identical to SEQ ID NO: 20348

SEQ ID NO: 39098 - DNA, 16 bp, Homo Sapiens
gtagaattctcgcctg

SEQ ID NO: 39099 - DNA, 17 bp, Homo Sapiens
gtagaattctcgcctgc

SEQ ID NO: 39100 - DNA, 18 bp, Homo Sapiens
gtagaattctcgcctgcc

SEQ ID NO: 39101 - DNA, 19 bp, Homo Sapiens
gtagaattctcgcctgcca

SEQ ID NO: 39102 - DNA, 20 bp, Homo Sapiens
gtagaattctcgcctgccac

SEQ ID NO: 39103 - DNA, 21 bp, Homo Sapiens
gtagaattctcgcctgccacg

SEQ ID NO: 39104 - DNA, 22 bp, Homo Sapiens
gtagaattctcgcctgccacgc

SEQ ID NO: 39105 - DNA, 23 bp, Homo Sapiens
gtagaattctcgcctgccacgcg

SEQ ID NO: 39106 - DNA, 24 bp, Homo Sapiens
gtagaattctcgcctgccacgcgg

SEQ ID NO: 39107 - DNA, 25 bp, Homo Sapiens
gtagaattctcgcctgccacgcggg

SEQ ID NO: 39108 - DNA, 26 bp, Homo Sapiens
gtagaattctcgcctgccacgcggga

SEQ ID NO: 39109 - DNA, 27 bp, Homo Sapiens
gtagaattctcgcctgccacgcgggag

SEQ ID NO: 39110 - DNA, 30 bp, Homo Sapiens; identical to SEQ ID NO: 20363

SEQ ID NO: 39111 - DNA, 31 bp, Homo Sapiens; identical to SEQ ID NO: 20364

SEQ ID NO: 39112 - DNA, 32 bp, Homo Sapiens; identical to SEQ ID NO: 20365

SEQ ID NO: 39113 - DNA, 33 bp, Homo Sapiens; identical to SEQ ID NO: 20366

SEQ ID NO: 39114 - DNA, 34 bp, Homo Sapiens; identical to SEQ ID NO: 20367

SEQ ID NO: 39115 - DNA, 35 bp, Homo Sapiens; identical to SEQ ID NO: 20368

SEQ ID NO: 39116 - DNA, 36 bp, Homo Sapiens; identical to SEQ ID NO: 20369

SEQ ID NO: 39117 - DNA, 37 bp, Homo Sapiens; identical to SEQ ID NO: 20370

SEQ ID NO: 39118 - DNA, 16 bp, Homo Sapiens
gtagagcatgagaccc

SEQ ID NO: 39119 - DNA, 16 bp, Homo Sapiens
gtagagcatgagactc

SEQ ID NO: 39120 - DNA, 17 bp, Homo Sapiens
gtagagcatgagactct

SEQ ID NO: 39121 - DNA, 23 bp, Homo Sapiens
gtagagcatgagactcttaatct

SEQ ID NO: 39122 - DNA, 34 bp, Homo Sapiens; identical to SEQ ID NO: 20393

SEQ ID NO: 39123 - DNA, 37 bp, Homo Sapiens; identical to SEQ ID NO: 20396

SEQ ID NO: 39124 - DNA, 16 bp, Homo Sapiens
gtagagcatgggactc

SEQ ID NO: 39125 - DNA, 17 bp, Homo Sapiens
gtagagcatgggactct

SEQ ID NO: 39126 - DNA, 23 bp, Homo Sapiens
gtagagcatgggactcttaatcc

SEQ ID NO: 39127 - DNA, 24 bp, Homo Sapiens
gtagagcatgggactcttaatccc

SEQ ID NO: 39128 - DNA, 34 bp, Homo Sapiens; identical to SEQ ID NO: 20409

SEQ ID NO: 39129 - DNA, 37 bp, Homo Sapiens; identical to SEQ ID NO: 20411

SEQ ID NO: 39130 - DNA, 16 bp, Homo Sapiens
gtagagcatttgactg

SEQ ID NO: 39131 - DNA, 17 bp, Homo Sapiens
gtagagcatttgactgc

SEQ ID NO: 39132 - DNA, 18 bp, Homo Sapiens
gtagtccgtgcgagaata

SEQ ID NO: 39133 - DNA, 20 bp, Homo Sapiens
gtagtccgtgcgagaatacc

SEQ ID NO: 39134 - DNA, 21 bp, Homo Sapiens
gtagtccgtgcgagaatacca

SEQ ID NO: 39135 - DNA, 16 bp, Homo Sapiens
gtagtcgtggccgagt

SEQ ID NO: 39136 - DNA, 17 bp, Homo Sapiens
gtagtcgtggccgagtg

SEQ ID NO: 39137 - DNA, 18 bp, Homo Sapiens
gtagtcgtggccgagtgg

SEQ ID NO: 39138 - DNA, 19 bp, Homo Sapiens
gtagtcgtggccgagtggt

SEQ ID NO: 39139 - DNA, 20 bp, Homo Sapiens
gtagtcgtggccgagtggtt

SEQ ID NO: 39140 - DNA, 21 bp, Homo Sapiens
gtagtcgtggccgagtggtta

SEQ ID NO: 39141 - DNA, 22 bp, Homo Sapiens
gtagtcgtggccgagtggttaa

SEQ ID NO: 39142 - DNA, 23 bp, Homo Sapiens
gtagtcgtggccgagtggttaag

SEQ ID NO: 39143 - DNA, 24 bp, Homo Sapiens
gtagtcgtggccgagtggttaagg

SEQ ID NO: 39144 - DNA, 25 bp, Homo Sapiens
gtagtcgtggccgagtggttaaggc

SEQ ID NO: 39145 - DNA, 21 bp, Homo Sapiens
gtagtggtatcatgcaagatt

SEQ ID NO: 39146 - DNA, 22 bp, Homo Sapiens
gtagtggtcatcacgttcgcct

SEQ ID NO: 39147 - DNA, 21 bp, Homo Sapiens
gtagtggttatcacgtctgct

SEQ ID NO: 39148 - DNA, 22 bp, Homo Sapiens
gtagtggttatcacgtctgctt

SEQ ID NO: 39149 - DNA, 22 bp, Homo Sapiens
gtagtggttatcacgttcgcct

SEQ ID NO: 39150 - DNA, 25 bp, Homo Sapiens
gtagtgtagtggttatcacgttcgc

SEQ ID NO: 39151 - DNA, 27 bp, Homo Sapiens
gtagtgtagtggttatcacgttcgcct

SEQ ID NO: 39152 - DNA, 46 bp, Homo Sapiens
gtagtgtagtggttatcacgttcgcctcacacgcgaaaggtccccg

SEQ ID NO: 39153 - DNA, 18 bp, Homo Sapiens
gtatagtggttagtactc

SEQ ID NO: 39154 - DNA, 21 bp, Homo Sapiens
gtatagtggttagtactctgc

SEQ ID NO: 39155 - DNA, 22 bp, Homo Sapiens
gtatagtggttagtactctgcg

SEQ ID NO: 39156 - DNA, 23 bp, Homo Sapiens
gtatagtggttagtactctgcgt

SEQ ID NO: 39157 - DNA, 24 bp, Homo Sapiens
gtatagtggttagtactctgcgtt

SEQ ID NO: 39158 - DNA, 25 bp, Homo Sapiens
gtatagtggttagtactctgcgttg

SEQ ID NO: 39159 - DNA, 26 bp, Homo Sapiens
gtatagtggttagtactctgcgttgt

SEQ ID NO: 39160 - DNA, 27 bp, Homo Sapiens
gtatagtggttagtactctgcgttgtg

SEQ ID NO: 39161 - DNA, 30 bp, Homo Sapiens; identical to SEQ ID NO: 20556

SEQ ID NO: 39162 - DNA, 39 bp, Homo Sapiens
gtatagtggttagtactctgcgttgtggccgcagcaacc

SEQ ID NO: 39163 - DNA, 40 bp, Homo Sapiens; identical to SEQ ID NO: 20558

SEQ ID NO: 39164 - DNA, 35 bp, Homo Sapiens
gtatgaggccccgggttcaatccccggcatctcca

SEQ ID NO: 39165 - DNA, 36 bp, Homo Sapiens
gtatgaggccccgggttcaatccccggcatctccac

SEQ ID NO: 39166 - DNA, 37 bp, Homo Sapiens; identical to SEQ ID NO: 20577

SEQ ID NO: 39167 - DNA, 35 bp, Homo Sapiens; identical to SEQ ID NO: 20587

SEQ ID NO: 39168 - DNA, 36 bp, Homo Sapiens; identical to SEQ ID NO: 20588

SEQ ID NO: 39169 - DNA, 37 bp, Homo Sapiens; identical to SEQ ID NO: 20589

SEQ ID NO: 39170 - DNA, 38 bp, Homo Sapiens; identical to SEQ ID NO: 20590

SEQ ID NO: 39171 - DNA, 35 bp, Homo Sapiens; identical to SEQ ID NO: 20596

SEQ ID NO: 39172 - DNA, 36 bp, Homo Sapiens; identical to SEQ ID NO: 20597

SEQ ID NO: 39173 - DNA, 37 bp, Homo Sapiens; identical to SEQ ID NO: 20598

SEQ ID NO: 39174 - DNA, 38 bp, Homo Sapiens
gtatgaggtcccgggttcgatccccggcatctccacca

SEQ ID NO: 39175 - DNA, 18 bp, Homo Sapiens
gtatgattctcgctttgg

SEQ ID NO: 39176 - DNA, 21 bp, Homo Sapiens
gtatgattctcgctttgggtg

SEQ ID NO: 39177 - DNA, 38 bp, Homo Sapiens
gtatgattctcgctttgggtgcgagaggtcccgggttc

SEQ ID NO: 39178 - DNA, 22 bp, Homo Sapiens
gtatgattctcggtttgggtcc

SEQ ID NO: 39179 - DNA, 23 bp, Homo Sapiens
gtatgattctcggtttgggtccg

SEQ ID NO: 39180 - DNA, 26 bp, Homo Sapiens
gtatgattctcggtttgggtccgaga

SEQ ID NO: 39181 - DNA, 38 bp, Homo Sapiens
gtatgattctcggtttgggtccgagaggtcccgggttc

SEQ ID NO: 39182 - DNA, 40 bp, Homo Sapiens; identical to SEQ ID NO: 20625

SEQ ID NO: 39183 - DNA, 40 bp, Homo Sapiens; identical to SEQ ID NO: 20633

SEQ ID NO: 39184 - DNA, 41 bp, Homo Sapiens; identical to SEQ ID NO: 20634

SEQ ID NO: 39185 - DNA, 42 bp, Homo Sapiens; identical to SEQ ID NO: 20635

SEQ ID NO: 39186 - DNA, 16 bp, Homo Sapiens
gtcacggtggccgagt

SEQ ID NO: 39187 - DNA, 18 bp, Homo Sapiens
gtcacggtggccgagtgg

SEQ ID NO: 39188 - DNA, 24 bp, Homo Sapiens
gtcacggtggccgagtggttaagg

SEQ ID NO: 39189 - DNA, 25 bp, Homo Sapiens
gtcacggtggccgagtggttaaggc

SEQ ID NO: 39190 - DNA, 16 bp, Homo Sapiens
gtcacgtcggggtcac

SEQ ID NO: 39191 - DNA, 17 bp, Homo Sapiens
gtcacgtcggggtcacc

SEQ ID NO: 39192 - DNA, 18 bp, Homo Sapiens
gtcacgtcggggtcacca

SEQ ID NO: 39193 - DNA, 23 bp, Homo Sapiens
gtcagctaaataagctatcgggc

SEQ ID NO: 39194 - DNA, 24 bp, Homo Sapiens
gtcagctaaataagctatcgggcc

SEQ ID NO: 39195 - DNA, 26 bp, Homo Sapiens
gtcagctaaataagctatcgggccca

SEQ ID NO: 39196 - DNA, 16 bp, Homo Sapiens
gtcaggatggccgagc

SEQ ID NO: 39197 - DNA, 17 bp, Homo Sapiens
gtcaggatggccgagcg

SEQ ID NO: 39198 - DNA, 18 bp, Homo Sapiens
gtcaggatggccgagcgg

SEQ ID NO: 39199 - DNA, 19 bp, Homo Sapiens
gtcaggatggccgagcggt

SEQ ID NO: 39200 - DNA, 20 bp, Homo Sapiens
gtcaggatggccgagcggtc

SEQ ID NO: 39201 - DNA, 21 bp, Homo Sapiens
gtcaggatggccgagcggtct

SEQ ID NO: 39202 - DNA, 22 bp, Homo Sapiens
gtcaggatggccgagcggtcta

SEQ ID NO: 39203 - DNA, 23 bp, Homo Sapiens
gtcaggatggccgagcggtctaa

SEQ ID NO: 39204 - DNA, 24 bp, Homo Sapiens
gtcaggatggccgagcggtctaag

SEQ ID NO: 39205 - DNA, 25 bp, Homo Sapiens
gtcaggatggccgagcggtctaagg

SEQ ID NO: 39206 - DNA, 26 bp, Homo Sapiens
gtcaggatggccgagcggtctaaggc

SEQ ID NO: 39207 - DNA, 29 bp, Homo Sapiens
gtcaggatggccgagcggtctaaggcgct

SEQ ID NO: 39208 - DNA, 30 bp, Homo Sapiens; identical to SEQ ID NO: 20674

SEQ ID NO: 39209 - DNA, 31 bp, Homo Sapiens; identical to SEQ ID NO: 20675

SEQ ID NO: 39210 - DNA, 32 bp, Homo Sapiens; identical to SEQ ID NO: 20676

SEQ ID NO: 39211 - DNA, 33 bp, Homo Sapiens; identical to SEQ ID NO: 20677

SEQ ID NO: 39212 - DNA, 34 bp, Homo Sapiens; identical to SEQ ID NO: 20678

SEQ ID NO: 39213 - DNA, 35 bp, Homo Sapiens; identical to SEQ ID NO: 20679

SEQ ID NO: 39214 - DNA, 36 bp, Homo Sapiens; identical to SEQ ID NO: 20680

SEQ ID NO: 39215 - DNA, 16 bp, Homo Sapiens
gtcaggatggccgagt

SEQ ID NO: 39216 - DNA, 17 bp, Homo Sapiens
gtcaggatggccgagtg

SEQ ID NO: 39217 - DNA, 18 bp, Homo Sapiens
gtcaggatggccgagtgg

SEQ ID NO: 39218 - DNA, 19 bp, Homo Sapiens
gtcaggatggccgagtggt

SEQ ID NO: 39219 - DNA, 20 bp, Homo Sapiens
gtcaggatggccgagtggtc

SEQ ID NO: 39220 - DNA, 21 bp, Homo Sapiens
gtcaggatggccgagtggtct

SEQ ID NO: 39221 - DNA, 22 bp, Homo Sapiens
gtcaggatggccgagtggtcta

SEQ ID NO: 39222 - DNA, 23 bp, Homo Sapiens
gtcaggatggccgagtggtctaa

SEQ ID NO: 39223 - DNA, 24 bp, Homo Sapiens
gtcaggatggccgagtggtctaag

SEQ ID NO: 39224 - DNA, 25 bp, Homo Sapiens
gtcaggatggccgagtggtctaagg

SEQ ID NO: 39225 - DNA, 26 bp, Homo Sapiens
gtcaggatggccgagtggtctaaggc

SEQ ID NO: 39226 - DNA, 29 bp, Homo Sapiens
gtcaggatggccgagtggtctaaggcgcc

SEQ ID NO: 39227 - DNA, 32 bp, Homo Sapiens; identical to SEQ ID NO: 20695

SEQ ID NO: 39228 - DNA, 33 bp, Homo Sapiens; identical to SEQ ID NO: 20696

SEQ ID NO: 39229 - DNA, 34 bp, Homo Sapiens; identical to SEQ ID NO: 20697

SEQ ID NO: 39230 - DNA, 18 bp, Homo Sapiens
gtcagtagagcatcagac

SEQ ID NO: 39231 - DNA, 28 bp, Homo Sapiens
gtccagggttcaagtccctgttcgggcg

SEQ ID NO: 39232 - DNA, 29 bp, Homo Sapiens
gtccagggttcaagtccctgttcgggcgc

SEQ ID NO: 39233 - DNA, 30 bp, Homo Sapiens; identical to SEQ ID NO: 20712

SEQ ID NO: 39234 - DNA, 16 bp, Homo Sapiens
gtcccaccagagtcgc

SEQ ID NO: 39235 - DNA, 17 bp, Homo Sapiens
gtcccaccagagtcgcc

SEQ ID NO: 39236 - DNA, 17 bp, Homo Sapiens
gtcccacctggggtacc

SEQ ID NO: 39237 - DNA, 18 bp, Homo Sapiens
gtcccacctggggtgcca

SEQ ID NO: 39238 - DNA, 17 bp, Homo Sapiens
gtcccatctggggtgcc

SEQ ID NO: 39239 - DNA, 17 bp, Homo Sapiens
gtcccatctgggtcgcc

SEQ ID NO: 39240 - DNA, 28 bp, Homo Sapiens
gtcccatggtgtaatggttagcactctg

SEQ ID NO: 39241 - DNA, 16 bp, Homo Sapiens
gtcccggcggagtcgc

SEQ ID NO: 39242 - DNA, 17 bp, Homo Sapiens
gtcccggcggagtcgcc

SEQ ID NO: 39243 - DNA, 18 bp, Homo Sapiens
gtcccggcggagtcgcca

SEQ ID NO: 39244 - DNA, 30 bp, Homo Sapiens; identical to SEQ ID NO: 20753

SEQ ID NO: 39245 - DNA, 27 bp, Homo Sapiens
gtccctggttcgatcccgggtttcggc

SEQ ID NO: 39246 - DNA, 29 bp, Homo Sapiens
gtccctggttcgatcccgggtttcggcac

SEQ ID NO: 39247 - DNA, 16 bp, Homo Sapiens
gtccctgtccaggcgc

SEQ ID NO: 39248 - DNA, 16 bp, Homo Sapiens
gtccctgttcgggcgc

SEQ ID NO: 39249 - DNA, 17 bp, Homo Sapiens
gtccctgttcgggcgcc

SEQ ID NO: 39250 - DNA, 18 bp, Homo Sapiens
gtccctgttcgggcgcca

SEQ ID NO: 39251 - DNA, 16 bp, Homo Sapiens
gtcccttcgtggtcgc

SEQ ID NO: 39252 - DNA, 17 bp, Homo Sapiens
gtcccttcgtggtcgcc

SEQ ID NO: 39253 - DNA, 18 bp, Homo Sapiens
gtcccttcgtggtcgcca

SEQ ID NO: 39254 - DNA, 16 bp, Homo Sapiens
gtcctgccgcggtcgc

SEQ ID NO: 39255 - DNA, 17 bp, Homo Sapiens
gtcctgccgcggtcgcc

SEQ ID NO: 39256 - DNA, 18 bp, Homo Sapiens
gtcctgccgcggtcgcca

SEQ ID NO: 39257 - DNA, 29 bp, Homo Sapiens
gtcctgggttcgagccccagtggaaccac

SEQ ID NO: 39258 - DNA, 30 bp, Homo Sapiens; identical to SEQ ID NO: 20796

SEQ ID NO: 39259 - DNA, 17 bp, Homo Sapiens
gtccttgtagtataaac

SEQ ID NO: 39260 - DNA, 18 bp, Homo Sapiens
gtccttgtagtataaact

SEQ ID NO: 39261 - DNA, 22 bp, Homo Sapiens
gtccttgtagtataaactaata

SEQ ID NO: 39262 - DNA, 27 bp, Homo Sapiens
gtccttgtagtataaactaatacacca

SEQ ID NO: 39263 - DNA, 28 bp, Homo Sapiens
gtccttgtagtataaactaatacaccag

SEQ ID NO: 39264 - DNA, 29 bp, Homo Sapiens
gtccttgtagtataaactaatacaccagt

SEQ ID NO: 39265 - DNA, 17 bp, Homo Sapiens
gtcgatggatcgaaacc

SEQ ID NO: 39266 - DNA, 30 bp, Homo Sapiens; identical to SEQ ID NO: 20825

SEQ ID NO: 39267 - DNA, 29 bp, Homo Sapiens
gtcgcgagttcaaatctcgctggggcctc

SEQ ID NO: 39268 - DNA, 29 bp, Homo Sapiens
gtcgctggttcgaatccggctcgaaggac

SEQ ID NO: 39269 - DNA, 30 bp, Homo Sapiens; identical to SEQ ID NO: 20847

SEQ ID NO: 39270 - DNA, 29 bp, Homo Sapiens
gtcgctggttcgaatccggctcggaggac

SEQ ID NO: 39271 - DNA, 30 bp, Homo Sapiens; identical to SEQ ID NO: 20850

SEQ ID NO: 39272 - DNA, 30 bp, Homo Sapiens; identical to SEQ ID NO: 20851

SEQ ID NO: 39273 - DNA, 29 bp, Homo Sapiens
gtcgctggttcgattccggctcgaaggac

SEQ ID NO: 39274 - DNA, 30 bp, Homo Sapiens; identical to SEQ ID NO: 20854

SEQ ID NO: 39275 - DNA, 18 bp, Homo Sapiens
gtcggtagagcataagac

SEQ ID NO: 39276 - DNA, 17 bp, Homo Sapiens
gtcggtagagcatcaga

SEQ ID NO: 39277 - DNA, 18 bp, Homo Sapiens
gtcggtagagcatcagac

SEQ ID NO: 39278 - DNA, 19 bp, Homo Sapiens
gtcggtagagcatcagact

SEQ ID NO: 39279 - DNA, 16 bp, Homo Sapiens
gtcggtagagcatgag

SEQ ID NO: 39280 - DNA, 17 bp, Homo Sapiens
gtcggtagagcatgaga

SEQ ID NO: 39281 - DNA, 18 bp, Homo Sapiens
gtcggtagagcatgagac

SEQ ID NO: 39282 - DNA, 19 bp, Homo Sapiens
gtcggtagagcatgagacc

SEQ ID NO: 39283 - DNA, 20 bp, Homo Sapiens
gtcggtagagcatgagaccc

SEQ ID NO: 39284 - DNA, 25 bp, Homo Sapiens
gtcggtagagcatgagacccttaat

SEQ ID NO: 39285 - DNA, 26 bp, Homo Sapiens
gtcggtagagcatgagacccttaatc

SEQ ID NO: 39286 - DNA, 19 bp, Homo Sapiens
gtcggtagagcatgagact

SEQ ID NO: 39287 - DNA, 20 bp, Homo Sapiens
gtcggtagagcatgagactc

SEQ ID NO: 39288 - DNA, 21 bp, Homo Sapiens
gtcggtagagcatgagactct

SEQ ID NO: 39289 - DNA, 26 bp, Homo Sapiens
gtcggtagagcatgagactcttaatc

SEQ ID NO: 39290 - DNA, 27 bp, Homo Sapiens
gtcggtagagcatgagactcttaatct

SEQ ID NO: 39291 - DNA, 28 bp, Homo Sapiens
gtcggtagagcatgagactcttaatctc

SEQ ID NO: 39292 - DNA, 29 bp, Homo Sapiens
gtcggtagagcatgagactcttaatctca

SEQ ID NO: 39293 - DNA, 38 bp, Homo Sapiens; identical to SEQ ID NO: 20891

SEQ ID NO: 39294 - DNA, 41 bp, Homo Sapiens; identical to SEQ ID NO: 20894

SEQ ID NO: 39295 - DNA, 16 bp, Homo Sapiens
gtcggtagagcatggg

SEQ ID NO: 39296 - DNA, 17 bp, Homo Sapiens
gtcggtagagcatggga

SEQ ID NO: 39297 - DNA, 18 bp, Homo Sapiens
gtcggtagagcatgggac

SEQ ID NO: 39298 - DNA, 19 bp, Homo Sapiens
gtcggtagagcatgggact

SEQ ID NO: 39299 - DNA, 20 bp, Homo Sapiens
gtcggtagagcatgggactc

SEQ ID NO: 39300 - DNA, 21 bp, Homo Sapiens
gtcggtagagcatgggactct

SEQ ID NO: 39301 - DNA, 26 bp, Homo Sapiens
gtcggtagagcatgggactcttaatc

SEQ ID NO: 39302 - DNA, 27 bp, Homo Sapiens
gtcggtagagcatgggactcttaatcc

SEQ ID NO: 39303 - DNA, 28 bp, Homo Sapiens
gtcggtagagcatgggactcttaatccc

SEQ ID NO: 39304 - DNA, 41 bp, Homo Sapiens; identical to SEQ ID NO: 20917

SEQ ID NO: 39305 - DNA, 27 bp, Homo Sapiens
gtcgtgggttcgagccccacgttgggc

SEQ ID NO: 39306 - DNA, 28 bp, Homo Sapiens
gtcgtgggttcgagccccacgttgggcg

SEQ ID NO: 39307 - DNA, 29 bp, Homo Sapiens
gtcgtgggttcgagccccacgttgggcgc

SEQ ID NO: 39308 - DNA, 30 bp, Homo Sapiens; identical to SEQ ID NO: 20938

SEQ ID NO: 39309 - DNA, 24 bp, Homo Sapiens
gtcgtggttgtagtccgtgcgaga

SEQ ID NO: 39310 - DNA, 25 bp, Homo Sapiens
gtcgtggttgtagtccgtgcgagaa

SEQ ID NO: 39311 - DNA, 27 bp, Homo Sapiens
gtcgtggttgtagtccgtgcgagaata

SEQ ID NO: 39312 - DNA, 29 bp, Homo Sapiens
gtcgtggttgtagtccgtgcgagaatacc

SEQ ID NO: 39313 - DNA, 30 bp, Homo Sapiens; identical to SEQ ID NO: 20954

SEQ ID NO: 39314 - DNA, 16 bp, Homo Sapiens
gtctagcggttaggat

SEQ ID NO: 39315 - DNA, 17 bp, Homo Sapiens
gtctagcggttaggatt

SEQ ID NO: 39316 - DNA, 19 bp, Homo Sapiens
gtctagcggttaggattcc

SEQ ID NO: 39317 - DNA, 24 bp, Homo Sapiens
gtctagcggttaggattcctggtt

SEQ ID NO: 39318 - DNA, 26 bp, Homo Sapiens
gtctagcggttaggattcctggtttt

SEQ ID NO: 39319 - DNA, 23 bp, Homo Sapiens
gtctaggggtatgattctcgctt

SEQ ID NO: 39320 - DNA, 23 bp, Homo Sapiens
gtctaggggtatgattctcggtt

SEQ ID NO: 39321 - DNA, 17 bp, Homo Sapiens
gtctagtggttaggatt

SEQ ID NO: 39322 - DNA, 22 bp, Homo Sapiens
gtctagtggttaggattcggcg

SEQ ID NO: 39323 - DNA, 23 bp, Homo Sapiens
gtctagtggttaggattcggcgc

SEQ ID NO: 39324 - DNA, 24 bp, Homo Sapiens
gtctagtggttaggattcggcgct

SEQ ID NO: 39325 - DNA, 25 bp, Homo Sapiens
gtctagtggttaggattcggcgctc

SEQ ID NO: 39326 - DNA, 40 bp, Homo Sapiens; identical to SEQ ID NO: 21013

SEQ ID NO: 39327 - DNA, 16 bp, Homo Sapiens
gtctcggtggaacctc

SEQ ID NO: 39328 - DNA, 17 bp, Homo Sapiens
gtctcggtggaacctcc

SEQ ID NO: 39329 - DNA, 16 bp, Homo Sapiens
gtctctgtggcgcaat

SEQ ID NO: 39330 - DNA, 18 bp, Homo Sapiens
gtctctgtggcgcaatcg

SEQ ID NO: 39331 - DNA, 19 bp, Homo Sapiens
gtctctgtggcgcaatcgg

SEQ ID NO: 39332 - DNA, 20 bp, Homo Sapiens
gtctctgtggcgcaatcggt

SEQ ID NO: 39333 - DNA, 19 bp, Homo Sapiens
gtctctgtggcgcaatgga

SEQ ID NO: 39334 - DNA, 20 bp, Homo Sapiens
gtctctgtggcgcaatggac

SEQ ID NO: 39335 - DNA, 21 bp, Homo Sapiens
gtctctgtggcgcaatggacg

SEQ ID NO: 39336 - DNA, 16 bp, Homo Sapiens
gtgaagcattggactg

SEQ ID NO: 39337 - DNA, 17 bp, Homo Sapiens
gtgaagcattggactgt

SEQ ID NO: 39338 - DNA, 18 bp, Homo Sapiens
gtgaagcattggactgta

SEQ ID NO: 39339 - DNA, 20 bp, Homo Sapiens
gtgaagcattggactgtaaa

SEQ ID NO: 39340 - DNA, 22 bp, Homo Sapiens
gtgaagcattggactgtaaatc

SEQ ID NO: 39341 - DNA, 24 bp, Homo Sapiens
gtgaagcattggactgtaaatcta

SEQ ID NO: 39342 - DNA, 25 bp, Homo Sapiens
gtgaagcattggactgtaaatctaa

SEQ ID NO: 39343 - DNA, 17 bp, Homo Sapiens
gtgaatctgacaacaga

SEQ ID NO: 39344 - DNA, 42 bp, Homo Sapiens; identical to SEQ ID NO: 21099

SEQ ID NO: 39345 - DNA, 32 bp, Homo Sapiens
gtgagaggtcccgggttcaaatcccggacgag

SEQ ID NO: 39346 - DNA, 33 bp, Homo Sapiens
gtgagaggtcccgggttcaaatcccggacgagc

SEQ ID NO: 39347 - DNA, 34 bp, Homo Sapiens
gtgagaggtcccgggttcaaatcccggacgagcc

SEQ ID NO: 39348 - DNA, 35 bp, Homo Sapiens; identical to SEQ ID NO: 21100

SEQ ID NO: 39349 - DNA, 36 bp, Homo Sapiens; identical to SEQ ID NO: 21101

SEQ ID NO: 39350 - DNA, 24 bp, Homo Sapiens
gtgagcactctggactctgaatcc

SEQ ID NO: 39351 - DNA, 27 bp, Homo Sapiens
gtgagcactctggactctgaatccagc

SEQ ID NO: 39352 - DNA, 34 bp, Homo Sapiens
gtgagcatagctgccttccaagcagttgacccgg

SEQ ID NO: 39353 - DNA, 35 bp, Homo Sapiens
gtgagcatagctgccttccaagcagttgacccggg

SEQ ID NO: 39354 - DNA, 19 bp, Homo Sapiens
gtgagtatccccgcctgtc

SEQ ID NO: 39355 - DNA, 27 bp, Homo Sapiens
gtgagtatccccgcctgtcacgcggga

SEQ ID NO: 39356 - DNA, 26 bp, Homo Sapiens
gtgatcgtatagtggttagtactctg

SEQ ID NO: 39357 - DNA, 27 bp, Homo Sapiens
gtgatcgtatagtggttagtactctgc

SEQ ID NO: 39358 - DNA, 28 bp, Homo Sapiens
gtgatcgtatagtggttagtactctgcg

SEQ ID NO: 39359 - DNA, 29 bp, Homo Sapiens
gtgatcgtatagtggttagtactctgcgt

SEQ ID NO: 39360 - DNA, 30 bp, Homo Sapiens; identical to SEQ ID NO: 21138

SEQ ID NO: 39361 - DNA, 32 bp, Homo Sapiens; identical to SEQ ID NO: 21140

SEQ ID NO: 39362 - DNA, 33 bp, Homo Sapiens; identical to SEQ ID NO: 21141

SEQ ID NO: 39363 - DNA, 23 bp, Homo Sapiens
gtgcaactccaaataaaagtacc

SEQ ID NO: 39364 - DNA, 21 bp, Homo Sapiens
gtgcagtggtagaattctcgc

SEQ ID NO: 39365 - DNA, 22 bp, Homo Sapiens
gtgcagtggtagaattctcgcc

SEQ ID NO: 39366 - DNA, 23 bp, Homo Sapiens
gtgcagtggtagaattctcgcct

SEQ ID NO: 39367 - DNA, 37 bp, Homo Sapiens
gtgcgagaggtcccgggttcaaatcccggacgagccc

SEQ ID NO: 39368 - DNA, 38 bp, Homo Sapiens; identical to SEQ ID NO: 21160

SEQ ID NO: 39369 - DNA, 39 bp, Homo Sapiens; identical to SEQ ID NO: 21161

SEQ ID NO: 39370 - DNA, 34 bp, Homo Sapiens; identical to SEQ ID NO: 21174

SEQ ID NO: 39371 - DNA, 35 bp, Homo Sapiens; identical to SEQ ID NO: 21175

SEQ ID NO: 39372 - DNA, 36 bp, Homo Sapiens; identical to SEQ ID NO: 21176

SEQ ID NO: 39373 - DNA, 28 bp, Homo Sapiens
gtgctgggcccataacccagaggtcgat

SEQ ID NO: 39374 - DNA, 29 bp, Homo Sapiens
gtgctgggcccataacccagaggtcgatg

SEQ ID NO: 39375 - DNA, 32 bp, Homo Sapiens; identical to SEQ ID NO: 21185

SEQ ID NO: 39376 - DNA, 39 bp, Homo Sapiens
gtgctttgcacgcgtgggttcgaatcccatcctcgtcgc

SEQ ID NO: 39377 - DNA, 40 bp, Homo Sapiens; identical to SEQ ID NO: 21196

SEQ ID NO: 39378 - DNA, 24 bp, Homo Sapiens
gtggagtggttatcacgttcgcct

SEQ ID NO: 39379 - DNA, 26 bp, Homo Sapiens
gtggagttaaagactttttctctgac

SEQ ID NO: 39380 - DNA, 27 bp, Homo Sapiens
gtggagttaaagactttttctctgacc

SEQ ID NO: 39381 - DNA, 28 bp, Homo Sapiens
gtggagttaaagactttttctctgacca

SEQ ID NO: 39382 - DNA, 19 bp, Homo Sapiens
gtggcccgggttcgactcc

SEQ ID NO: 39383 - DNA, 23 bp, Homo Sapiens
gtggcccgggttcgactcccggt

SEQ ID NO: 39384 - DNA, 30 bp, Homo Sapiens; identical to SEQ ID NO: 21217

SEQ ID NO: 39385 - DNA, 31 bp, Homo Sapiens
gtggcccgggttcgactcccggtatgggaac

SEQ ID NO: 39386 - DNA, 32 bp, Homo Sapiens; identical to SEQ ID NO: 21218

SEQ ID NO: 39387 - DNA, 17 bp, Homo Sapiens
gtggccgagtggttaag

SEQ ID NO: 39388 - DNA, 18 bp, Homo Sapiens
gtggccgagtggttaagg

SEQ ID NO: 39389 - DNA, 16 bp, Homo Sapiens
gtggccgcagcaacct

SEQ ID NO: 39390 - DNA, 27 bp, Homo Sapiens
gtggcgcaatggataacgcgtctgact

SEQ ID NO: 39391 - DNA, 16 bp, Homo Sapiens
gtggcgcagcggaagc

SEQ ID NO: 39392 - DNA, 17 bp, Homo Sapiens
gtggcgcagcggaagcg

SEQ ID NO: 39393 - DNA, 25 bp, Homo Sapiens
gtggcgcagcggaagcgtgctgggc

SEQ ID NO: 39394 - DNA, 27 bp, Homo Sapiens
gtggcgcagcggaagcgtgctgggccc

SEQ ID NO: 39395 - DNA, 33 bp, Homo Sapiens
gtggcgcagcggaagcgtgctgggcccataacc

SEQ ID NO: 39396 - DNA, 16 bp, Homo Sapiens
gtggctaggattcggc

SEQ ID NO: 39397 - DNA, 18 bp, Homo Sapiens
gtgggtagagcatcagac

SEQ ID NO: 39398 - DNA, 26 bp, Homo Sapiens
gtgggttcgaatcccaccagagtcgc

SEQ ID NO: 39399 - DNA, 27 bp, Homo Sapiens
gtgggttcgaatcccaccagagtcgcc

SEQ ID NO: 39400 - DNA, 27 bp, Homo Sapiens
gtgggttcgaatcccaccctcgtcgcc

SEQ ID NO: 39401 - DNA, 26 bp, Homo Sapiens
gtgggttcgaatcccaccgctgccac

SEQ ID NO: 39402 - DNA, 27 bp, Homo Sapiens
gtgggttcgaatcccaccttcgtcgcc

SEQ ID NO: 39403 - DNA, 25 bp, Homo Sapiens
gtgggttcgaatcccacttctgaca

SEQ ID NO: 39404 - DNA, 26 bp, Homo Sapiens
gtgggttcgaatcccatcctcgtcgc

SEQ ID NO: 39405 - DNA, 27 bp, Homo Sapiens
gtgggttcgaatcccatcctcgtcgcc

SEQ ID NO: 39406 - DNA, 28 bp, Homo Sapiens
gtgggttcgaatcccatcctcgtcgcca

SEQ ID NO: 39407 - DNA, 25 bp, Homo Sapiens
gtgggttcgagccccacgttgggcg

SEQ ID NO: 39408 - DNA, 26 bp, Homo Sapiens
gtgggttcgagccccacgttgggcgc

SEQ ID NO: 39409 - DNA, 27 bp, Homo Sapiens
gtgggttcgagccccacgttgggcgcc

SEQ ID NO: 39410 - DNA, 26 bp, Homo Sapiens
gtgggttcgagtcccaccagagtcgc

SEQ ID NO: 39411 - DNA, 27 bp, Homo Sapiens
gtgggttcgagtcccaccagagtcgcc

SEQ ID NO: 39412 - DNA, 26 bp, Homo Sapiens
gtgggttcgagtcccatctgggtcgc

SEQ ID NO: 39413 - DNA, 27 bp, Homo Sapiens
gtgggttcgagtcccatctgggtcgcc

SEQ ID NO: 39414 - DNA, 26 bp, Homo Sapiens
gtgggtttaagtcccattggtctagc

SEQ ID NO: 39415 - DNA, 27 bp, Homo Sapiens
gtgggtttaagtcccattggtctagcc

SEQ ID NO: 39416 - DNA, 16 bp, Homo Sapiens
gtggtaaggcgtcggt

SEQ ID NO: 39417 - DNA, 16 bp, Homo Sapiens
gtggtagaattctcgc

SEQ ID NO: 39418 - DNA, 17 bp, Homo Sapiens
gtggtagaattctcgcc

SEQ ID NO: 39419 - DNA, 18 bp, Homo Sapiens
gtggtagaattctcgcct

SEQ ID NO: 39420 - DNA, 19 bp, Homo Sapiens
gtggtagaattctcgcctc

SEQ ID NO: 39421 - DNA, 19 bp, Homo Sapiens
gtggtagaattctcgcctg

SEQ ID NO: 39422 - DNA, 20 bp, Homo Sapiens
gtggtagaattctcgcctgc

SEQ ID NO: 39423 - DNA, 21 bp, Homo Sapiens
gtggtagaattctcgcctgcc

SEQ ID NO: 39424 - DNA, 22 bp, Homo Sapiens
gtggtagaattctcgcctgcca

SEQ ID NO: 39425 - DNA, 23 bp, Homo Sapiens
gtggtagaattctcgcctgccac

SEQ ID NO: 39426 - DNA, 29 bp, Homo Sapiens
gtggtagaattctcgcctgccacgcggga

SEQ ID NO: 39427 - DNA, 34 bp, Homo Sapiens; identical to SEQ ID NO: 21294

SEQ ID NO: 39428 - DNA, 36 bp, Homo Sapiens; identical to SEQ ID NO: 21295

SEQ ID NO: 39429 - DNA, 38 bp, Homo Sapiens; identical to SEQ ID NO: 21297

SEQ ID NO: 39430 - DNA, 18 bp, Homo Sapiens
gtggtagagcatttgact

SEQ ID NO: 39431 - DNA, 20 bp, Homo Sapiens
gtggtagagcatttgactgc

SEQ ID NO: 39432 - DNA, 16 bp, Homo Sapiens
gtggtagagcgcatgc

SEQ ID NO: 39433 - DNA, 16 bp, Homo Sapiens
gtggtagagcgcgtgc

SEQ ID NO: 39434 - DNA, 17 bp, Homo Sapiens
gtggtagagcgcgtgct

SEQ ID NO: 39435 - DNA, 16 bp, Homo Sapiens
gtggtatcatgcaaga

SEQ ID NO: 39436 - DNA, 17 bp, Homo Sapiens
gtggtatcatgcaagat

SEQ ID NO: 39437 - DNA, 18 bp, Homo Sapiens
gtggtatcatgcaagatt

SEQ ID NO: 39438 - DNA, 16 bp, Homo Sapiens
gtggtatgattctcgc

SEQ ID NO: 39439 - DNA, 18 bp, Homo Sapiens
gtggtatgattctcgctt

SEQ ID NO: 39440 - DNA, 17 bp, Homo Sapiens
gtggtcatcacgttcgc

SEQ ID NO: 39441 - DNA, 20 bp, Homo Sapiens
gtggtctagtggttaggatt

SEQ ID NO: 39442 - DNA, 21 bp, Homo Sapiens
gtggtctagtggttaggattc

SEQ ID NO: 39443 - DNA, 24 bp, Homo Sapiens
gtggtctagtggttaggattcggc

SEQ ID NO: 39444 - DNA, 26 bp, Homo Sapiens
gtggtctagtggttaggattcggcgc

SEQ ID NO: 39445 - DNA, 27 bp, Homo Sapiens
gtggtctagtggttaggattcggcgct

SEQ ID NO: 39446 - DNA, 29 bp, Homo Sapiens
gtggtctagtggttaggattcggcgctct

SEQ ID NO: 39447 - DNA, 36 bp, Homo Sapiens
gtggtctagtggttaggattcggcgctctcaccgcc

SEQ ID NO: 39448 - DNA, 43 bp, Homo Sapiens; identical to SEQ ID NO: 21362

SEQ ID NO: 39449 - DNA, 45 bp, Homo Sapiens
gtggtctagtggttaggattcggcgctctcaccgccgcggcccgg

SEQ ID NO: 39450 - DNA, 18 bp, Homo Sapiens
gtggttaaggcattggac

SEQ ID NO: 39451 - DNA, 19 bp, Homo Sapiens
gtggttaaggcattggact

SEQ ID NO: 39452 - DNA, 16 bp, Homo Sapiens
gtggttaggattcggc

SEQ ID NO: 39453 - DNA, 17 bp, Homo Sapiens
gtggttaggattcggcg

SEQ ID NO: 39454 - DNA, 18 bp, Homo Sapiens
gtggttaggattcggcgc

SEQ ID NO: 39455 - DNA, 19 bp, Homo Sapiens
gtggttaggattcggcgct

SEQ ID NO: 39456 - DNA, 20 bp, Homo Sapiens
gtggttaggattcggcgctc

SEQ ID NO: 39457 - DNA, 21 bp, Homo Sapiens
gtggttaggattcggcgctct

SEQ ID NO: 39458 - DNA, 23 bp, Homo Sapiens
gtggttaggattcggcgctctca

SEQ ID NO: 39459 - DNA, 25 bp, Homo Sapiens
gtggttaggattcggcgctctcacc

SEQ ID NO: 39460 - DNA, 28 bp, Homo Sapiens
gtggttaggattcggcgctctcaccgcc

SEQ ID NO: 39461 - DNA, 35 bp, Homo Sapiens; identical to SEQ ID NO: 21407

SEQ ID NO: 39462 - DNA, 38 bp, Homo Sapiens; identical to SEQ ID NO: 21410

SEQ ID NO: 39463 - DNA, 16 bp, Homo Sapiens
gtggttagtactctgc

SEQ ID NO: 39464 - DNA, 17 bp, Homo Sapiens
gtggttagtactctgcg

SEQ ID NO: 39465 - DNA, 18 bp, Homo Sapiens
gtggttagtactctgcgt

SEQ ID NO: 39466 - DNA, 19 bp, Homo Sapiens
gtggttagtactctgcgtt

SEQ ID NO: 39467 - DNA, 20 bp, Homo Sapiens
gtggttagtactctgcgttg

SEQ ID NO: 39468 - DNA, 21 bp, Homo Sapiens
gtggttagtactctgcgttgt

SEQ ID NO: 39469 - DNA, 22 bp, Homo Sapiens
gtggttagtactctgcgttgtg

SEQ ID NO: 39470 - DNA, 25 bp, Homo Sapiens
gtggttagtactctgcgttgtggcc

SEQ ID NO: 39471 - DNA, 30 bp, Homo Sapiens
gtggttagtactctgcgttgtggccgcagc

SEQ ID NO: 39472 - DNA, 34 bp, Homo Sapiens; identical to SEQ ID NO: 21428

SEQ ID NO: 39473 - DNA, 35 bp, Homo Sapiens; identical to SEQ ID NO: 21429

SEQ ID NO: 39474 - DNA, 17 bp, Homo Sapiens
gtggttatcacgtctgc

SEQ ID NO: 39475 - DNA, 18 bp, Homo Sapiens
gtggttatcacgtctgct

SEQ ID NO: 39476 - DNA, 19 bp, Homo Sapiens
gtggttatcacgtctgctt

SEQ ID NO: 39477 - DNA, 20 bp, Homo Sapiens
gtggttatcacgtctgcttt

SEQ ID NO: 39478 - DNA, 21 bp, Homo Sapiens
gtggttatcacgtctgcttta

SEQ ID NO: 39479 - DNA, 16 bp, Homo Sapiens
gtggttatcacgttcg

SEQ ID NO: 39480 - DNA, 17 bp, Homo Sapiens
gtggttatcacgttcgc

SEQ ID NO: 39481 - DNA, 18 bp, Homo Sapiens
gtggttatcacgttcgcc

SEQ ID NO: 39482 - DNA, 19 bp, Homo Sapiens
gtggttatcacgttcgcct

SEQ ID NO: 39483 - DNA, 20 bp, Homo Sapiens
gtggttatcacgttcgcctc

SEQ ID NO: 39484 - DNA, 22 bp, Homo Sapiens
gtggttatcacgttcgcctcac

SEQ ID NO: 39485 - DNA, 25 bp, Homo Sapiens
gtggttatcacgttcgcctcacacg

SEQ ID NO: 39486 - DNA, 26 bp, Homo Sapiens
gtggttatcacgttcgcctcacacgc

SEQ ID NO: 39487 - DNA, 19 bp, Homo Sapiens
gtggttcagtggtagaatt

SEQ ID NO: 39488 - DNA, 20 bp, Homo Sapiens
gtggttcagtggtagaattc

SEQ ID NO: 39489 - DNA, 22 bp, Homo Sapiens
gtggttcagtggtagaattctc

SEQ ID NO: 39490 - DNA, 24 bp, Homo Sapiens
gtggttcagtggtagaattctcgc

SEQ ID NO: 39491 - DNA, 25 bp, Homo Sapiens
gtggttcagtggtagaattctcgcc

SEQ ID NO: 39492 - DNA, 26 bp, Homo Sapiens
gtggttcagtggtagaattctcgcct

SEQ ID NO: 39493 - DNA, 28 bp, Homo Sapiens
gtggttcagtggtagaattctcgcctgc

SEQ ID NO: 39494 - DNA, 29 bp, Homo Sapiens
gtggttcagtggtagaattctcgcctgcc

SEQ ID NO: 39495 - DNA, 31 bp, Homo Sapiens; identical to SEQ ID NO: 21490

SEQ ID NO: 39496 - DNA, 32 bp, Homo Sapiens; identical to SEQ ID NO: 21491

SEQ ID NO: 39497 - DNA, 42 bp, Homo Sapiens; identical to SEQ ID NO: 21493

SEQ ID NO: 39498 - DNA, 43 bp, Homo Sapiens
gtggttcagtggtagaattctcgcctgccacgcgggaggcccg

SEQ ID NO: 39499 - DNA, 44 bp, Homo Sapiens; identical to SEQ ID NO: 21494

SEQ ID NO: 39500 - DNA, 45 bp, Homo Sapiens; identical to SEQ ID NO: 21495

SEQ ID NO: 39501 - DNA, 26 bp, Homo Sapiens
gtggttcgagcccacccagggacgcc

SEQ ID NO: 39502 - DNA, 17 bp, Homo Sapiens
gtggttgtagtccgtgc

SEQ ID NO: 39503 - DNA, 18 bp, Homo Sapiens
gtggttgtagtccgtgcg

SEQ ID NO: 39504 - DNA, 20 bp, Homo Sapiens
gtggttgtagtccgtgcgag

SEQ ID NO: 39505 - DNA, 21 bp, Homo Sapiens
gtggttgtagtccgtgcgaga

SEQ ID NO: 39506 - DNA, 22 bp, Homo Sapiens
gtggttgtagtccgtgcgagaa

SEQ ID NO: 39507 - DNA, 23 bp, Homo Sapiens
gtggttgtagtccgtgcgagaat

SEQ ID NO: 39508 - DNA, 24 bp, Homo Sapiens
gtggttgtagtccgtgcgagaata

SEQ ID NO: 39509 - DNA, 25 bp, Homo Sapiens
gtggttgtagtccgtgcgagaatac

SEQ ID NO: 39510 - DNA, 26 bp, Homo Sapiens
gtggttgtagtccgtgcgagaatacc

SEQ ID NO: 39511 - DNA, 27 bp, Homo Sapiens
gtggttgtagtccgtgcgagaatacca

SEQ ID NO: 39512 - DNA, 26 bp, Homo Sapiens
gtggtttagtggtagaattctcgcct

SEQ ID NO: 39513 - DNA, 20 bp, Homo Sapiens
gtgtaatggttagcactctg

SEQ ID NO: 39514 - DNA, 22 bp, Homo Sapiens
gtgtaatggttagcactctgga

SEQ ID NO: 39515 - DNA, 23 bp, Homo Sapiens
gtgtaatggttagcactctggac

SEQ ID NO: 39516 - DNA, 24 bp, Homo Sapiens
gtgtaatggttagcactctggact

SEQ ID NO: 39517 - DNA, 25 bp, Homo Sapiens
gtgtaatggttagcactctggactc

SEQ ID NO: 39518 - DNA, 26 bp, Homo Sapiens
gtgtaatggttagcactctggactct

SEQ ID NO: 39519 - DNA, 31 bp, Homo Sapiens; identical to SEQ ID NO: 21537

SEQ ID NO: 39520 - DNA, 32 bp, Homo Sapiens; identical to SEQ ID NO: 21538

SEQ ID NO: 39521 - DNA, 43 bp, Homo Sapiens; identical to SEQ ID NO: 21543

SEQ ID NO: 39522 - DNA, 32 bp, Homo Sapiens; identical to SEQ ID NO: 21550

SEQ ID NO: 39523 - DNA, 16 bp, Homo Sapiens
gtgtagtggtatcatg

SEQ ID NO: 39524 - DNA, 41 bp, Homo Sapiens; identical to SEQ ID NO: 21569

SEQ ID NO: 39525 - DNA, 43 bp, Homo Sapiens; identical to SEQ ID NO: 21571

SEQ ID NO: 39526 - DNA, 24 bp, Homo Sapiens
gtgtagtggtcatcacgttcgcct

SEQ ID NO: 39527 - DNA, 21 bp, Homo Sapiens
gtgtagtggttatcacgtctg

SEQ ID NO: 39528 - DNA, 22 bp, Homo Sapiens
gtgtagtggttatcacgttcgc

SEQ ID NO: 39529 - DNA, 23 bp, Homo Sapiens
gtgtagtggttatcacgttcgcc

SEQ ID NO: 39530 - DNA, 24 bp, Homo Sapiens
gtgtagtggttatcacgttcgcct

SEQ ID NO: 39531 - DNA, 25 bp, Homo Sapiens
gtgtagtggttatcacgttcgcctc

SEQ ID NO: 39532 - DNA, 16 bp, Homo Sapiens
gtgtgaggtcccgggt

SEQ ID NO: 39533 - DNA, 22 bp, Homo Sapiens
gtgtgataggtggcacggagaa

SEQ ID NO: 39534 - DNA, 23 bp, Homo Sapiens
gtgttcaaatcacgtcggggtca

SEQ ID NO: 39535 - DNA, 24 bp, Homo Sapiens
gtgttcaaatcacgtcggggtcac

SEQ ID NO: 39536 - DNA, 25 bp, Homo Sapiens
gtgttcaaatcacgtcggggtcacc

SEQ ID NO: 39537 - DNA, 24 bp, Homo Sapiens
gtgttcaagtcacgtcggggtcac

SEQ ID NO: 39538 - DNA, 25 bp, Homo Sapiens
gtgttcaagtcacgtcggggtcacc

SEQ ID NO: 39539 - DNA, 26 bp, Homo Sapiens
gtgttcaagtcacgtcggggtcacca

SEQ ID NO: 39540 - DNA, 23 bp, Homo Sapiens
gtgttcgaatcacgtcggggtca

SEQ ID NO: 39541 - DNA, 24 bp, Homo Sapiens
gtgttcgaatcacgtcggggtcac

SEQ ID NO: 39542 - DNA, 25 bp, Homo Sapiens
gtgttcgaatcacgtcggggtcacc

SEQ ID NO: 39543 - DNA, 26 bp, Homo Sapiens
gtgttcgaatcacgtcggggtcacca

SEQ ID NO: 39544 - DNA, 32 bp, Homo Sapiens; identical to SEQ ID NO: 21621

SEQ ID NO: 39545 - DNA, 33 bp, Homo Sapiens; identical to SEQ ID NO: 21622

SEQ ID NO: 39546 - DNA, 34 bp, Homo Sapiens; identical to SEQ ID NO: 21623

SEQ ID NO: 39547 - DNA, 17 bp, Homo Sapiens
gttaaagactttttctc

SEQ ID NO: 39548 - DNA, 20 bp, Homo Sapiens
gttaaagactttttctctga

SEQ ID NO: 39549 - DNA, 21 bp, Homo Sapiens
gttaaagactttttctctgac

SEQ ID NO: 39550 - DNA, 22 bp, Homo Sapiens
gttaaagactttttctctgacc

SEQ ID NO: 39551 - DNA, 23 bp, Homo Sapiens
gttaaagactttttctctgacca

SEQ ID NO: 39552 - DNA, 19 bp, Homo Sapiens
gttaaagattaagagaacc

SEQ ID NO: 39553 - DNA, 36 bp, Homo Sapiens; identical to SEQ ID NO: 21652

SEQ ID NO: 39554 - DNA, 37 bp, Homo Sapiens; identical to SEQ ID NO: 21653

SEQ ID NO: 39555 - DNA, 38 bp, Homo Sapiens; identical to SEQ ID NO: 21654

SEQ ID NO: 39556 - DNA, 39 bp, Homo Sapiens; identical to SEQ ID NO: 21655

SEQ ID NO: 39557 - DNA, 40 bp, Homo Sapiens; identical to SEQ ID NO: 21656

SEQ ID NO: 39558 - DNA, 16 bp, Homo Sapiens
gttaagatggcagagc

SEQ ID NO: 39559 - DNA, 17 bp, Homo Sapiens
gttaagatggcagagcc

SEQ ID NO: 39560 - DNA, 18 bp, Homo Sapiens
gttaagatggcagagccc

SEQ ID NO: 39561 - DNA, 19 bp, Homo Sapiens
gttaagatggcagagcccg

SEQ ID NO: 39562 - DNA, 20 bp, Homo Sapiens
gttaagatggcagagcccgg

SEQ ID NO: 39563 - DNA, 21 bp, Homo Sapiens
gttaagatggcagagcccggt

SEQ ID NO: 39564 - DNA, 22 bp, Homo Sapiens
gttaagatggcagagcccggta

SEQ ID NO: 39565 - DNA, 24 bp, Homo Sapiens
gttaagatggcagagcccggtaat

SEQ ID NO: 39566 - DNA, 25 bp, Homo Sapiens
gttaagatggcagagcccggtaatc

SEQ ID NO: 39567 - DNA, 27 bp, Homo Sapiens
gttaagatggcagagcccggtaatcgc

SEQ ID NO: 39568 - DNA, 28 bp, Homo Sapiens
gttaagatggcagagcccggtaatcgca

SEQ ID NO: 39569 - DNA, 29 bp, Homo Sapiens
gttaagatggcagagcccggtaatcgcat

SEQ ID NO: 39570 - DNA, 30 bp, Homo Sapiens; identical to SEQ ID NO: 21718

SEQ ID NO: 39571 - DNA, 31 bp, Homo Sapiens; identical to SEQ ID NO: 21719

SEQ ID NO: 39572 - DNA, 32 bp, Homo Sapiens; identical to SEQ ID NO: 21720

SEQ ID NO: 39573 - DNA, 33 bp, Homo Sapiens; identical to SEQ ID NO: 21721

SEQ ID NO: 39574 - DNA, 34 bp, Homo Sapiens; identical to SEQ ID NO: 21722

SEQ ID NO: 39575 - DNA, 35 bp, Homo Sapiens; identical to SEQ ID NO: 21723

SEQ ID NO: 39576 - DNA, 37 bp, Homo Sapiens; identical to SEQ ID NO: 21725

SEQ ID NO: 39577 - DNA, 38 bp, Homo Sapiens; identical to SEQ ID NO: 21726

SEQ ID NO: 39578 - DNA, 39 bp, Homo Sapiens; identical to SEQ ID NO: 21727

SEQ ID NO: 39579 - DNA, 40 bp, Homo Sapiens; identical to SEQ ID NO: 21728

SEQ ID NO: 39580 - DNA, 42 bp, Homo Sapiens; identical to SEQ ID NO: 21730

SEQ ID NO: 39581 - DNA, 43 bp, Homo Sapiens; identical to SEQ ID NO: 21731

SEQ ID NO: 39582 - DNA, 44 bp, Homo Sapiens; identical to SEQ ID NO: 21732

SEQ ID NO: 39583 - DNA, 45 bp, Homo Sapiens; identical to SEQ ID NO: 21733

SEQ ID NO: 39584 - DNA, 46 bp, Homo Sapiens; identical to SEQ ID NO: 21734

SEQ ID NO: 39585 - DNA, 47 bp, Homo Sapiens; identical to SEQ ID NO: 21735

SEQ ID NO: 39586 - DNA, 16 bp, Homo Sapiens
gttagcactctggact

SEQ ID NO: 39587 - DNA, 17 bp, Homo Sapiens
gttagcactctggactc

SEQ ID NO: 39588 - DNA, 18 bp, Homo Sapiens
gttagcactctggactct

SEQ ID NO: 39589 - DNA, 19 bp, Homo Sapiens
gttagcactctggactctg

SEQ ID NO: 39590 - DNA, 20 bp, Homo Sapiens
gttagcactctggactctga

SEQ ID NO: 39591 - DNA, 21 bp, Homo Sapiens
gttagcactctggactctgaa

SEQ ID NO: 39592 - DNA, 22 bp, Homo Sapiens
gttagcactctggactctgaat

SEQ ID NO: 39593 - DNA, 23 bp, Homo Sapiens
gttagcactctggactctgaatc

SEQ ID NO: 39594 - DNA, 24 bp, Homo Sapiens
gttagcactctggactctgaatcc

SEQ ID NO: 39595 - DNA, 25 bp, Homo Sapiens
gttagcactctggactctgaatcca

SEQ ID NO: 39596 - DNA, 26 bp, Homo Sapiens
gttagcactctggactctgaatccag

SEQ ID NO: 39597 - DNA, 27 bp, Homo Sapiens
gttagcactctggactctgaatccagc

SEQ ID NO: 39598 - DNA, 28 bp, Homo Sapiens
gttagcactctggactctgaatccagcg

SEQ ID NO: 39599 - DNA, 32 bp, Homo Sapiens
gttagcactctggactctgaatccagcgatcc

SEQ ID NO: 39600 - DNA, 33 bp, Homo Sapiens; identical to SEQ ID NO: 21754

SEQ ID NO: 39601 - DNA, 35 bp, Homo Sapiens; identical to SEQ ID NO: 21756

SEQ ID NO: 39602 - DNA, 36 bp, Homo Sapiens; identical to SEQ ID NO: 21757

SEQ ID NO: 39603 - DNA, 37 bp, Homo Sapiens; identical to SEQ ID NO: 21758

SEQ ID NO: 39604 - DNA, 38 bp, Homo Sapiens; identical to SEQ ID NO: 21759

SEQ ID NO: 39605 - DNA, 39 bp, Homo Sapiens; identical to SEQ ID NO: 21760

SEQ ID NO: 39606 - DNA, 47 bp, Homo Sapiens
gttagcactctggactctgaatccagcgatccgagttcaaatctcgg

SEQ ID NO: 39607 - DNA, 20 bp, Homo Sapiens
gttagcactctggactttga

SEQ ID NO: 39608 - DNA, 21 bp, Homo Sapiens
gttagcactctggactttgaa

SEQ ID NO: 39609 - DNA, 22 bp, Homo Sapiens
gttagcactctggactttgaat

SEQ ID NO: 39610 - DNA, 23 bp, Homo Sapiens
gttagcactctggactttgaatc

SEQ ID NO: 39611 - DNA, 24 bp, Homo Sapiens
gttagcactctggactttgaatcc

SEQ ID NO: 39612 - DNA, 35 bp, Homo Sapiens; identical to SEQ ID NO: 21766

SEQ ID NO: 39613 - DNA, 36 bp, Homo Sapiens; identical to SEQ ID NO: 21767

SEQ ID NO: 39614 - DNA, 47 bp, Homo Sapiens
gttagcactctggactttgaatccagcgatccgagttcaaatctcgg

SEQ ID NO: 39615 - DNA, 16 bp, Homo Sapiens
gttaggattcctggtt

SEQ ID NO: 39616 - DNA, 17 bp, Homo Sapiens
gttaggattcctggttt

SEQ ID NO: 39617 - DNA, 18 bp, Homo Sapiens
gttaggattcctggtttt

SEQ ID NO: 39618 - DNA, 26 bp, Homo Sapiens
gttaggattcctggttttcacccagg

SEQ ID NO: 39619 - DNA, 28 bp, Homo Sapiens
gttaggattcctggttttcacccaggtg

SEQ ID NO: 39620 - DNA, 16 bp, Homo Sapiens
gttaggattcggcgct

SEQ ID NO: 39621 - DNA, 17 bp, Homo Sapiens
gttaggattcggcgctc

SEQ ID NO: 39622 - DNA, 18 bp, Homo Sapiens
gttaggattcggcgctct

SEQ ID NO: 39623 - DNA, 19 bp, Homo Sapiens
gttaggattcggcgctctc

SEQ ID NO: 39624 - DNA, 20 bp, Homo Sapiens
gttaggattcggcgctctca

SEQ ID NO: 39625 - DNA, 21 bp, Homo Sapiens
gttaggattcggcgctctcac

SEQ ID NO: 39626 - DNA, 22 bp, Homo Sapiens
gttaggattcggcgctctcacc

SEQ ID NO: 39627 - DNA, 23 bp, Homo Sapiens
gttaggattcggcgctctcaccg

SEQ ID NO: 39628 - DNA, 24 bp, Homo Sapiens
gttaggattcggcgctctcaccgc

SEQ ID NO: 39629 - DNA, 25 bp, Homo Sapiens
gttaggattcggcgctctcaccgcc

SEQ ID NO: 39630 - DNA, 30 bp, Homo Sapiens; identical to SEQ ID NO: 21795

SEQ ID NO: 39631 - DNA, 31 bp, Homo Sapiens; identical to SEQ ID NO: 21796

SEQ ID NO: 39632 - DNA, 32 bp, Homo Sapiens; identical to SEQ ID NO: 21797

SEQ ID NO: 39633 - DNA, 35 bp, Homo Sapiens; identical to SEQ ID NO: 21800

SEQ ID NO: 39634 - DNA, 37 bp, Homo Sapiens; identical to SEQ ID NO: 21802

SEQ ID NO: 39635 - DNA, 21 bp, Homo Sapiens
gttaggcctctttttaccacc

SEQ ID NO: 39636 - DNA, 22 bp, Homo Sapiens
gttaggcctctttttaccacca

SEQ ID NO: 39637 - DNA, 16 bp, Homo Sapiens
gttagtactctgcgtt

SEQ ID NO: 39638 - DNA, 17 bp, Homo Sapiens
gttagtactctgcgttg

SEQ ID NO: 39639 - DNA, 18 bp, Homo Sapiens
gttagtactctgcgttgt

SEQ ID NO: 39640 - DNA, 22 bp, Homo Sapiens
gttagtactctgcgttgtggcc

SEQ ID NO: 39641 - DNA, 23 bp, Homo Sapiens
gttagtactctgcgttgtggccg

SEQ ID NO: 39642 - DNA, 27 bp, Homo Sapiens
gttagtactctgcgttgtggccgcagc

SEQ ID NO: 39643 - DNA, 31 bp, Homo Sapiens; identical to SEQ ID NO: 21821

SEQ ID NO: 39644 - DNA, 32 bp, Homo Sapiens; identical to SEQ ID NO: 21822

SEQ ID NO: 39645 - DNA, 23 bp, Homo Sapiens
gttatacccttcccgtactacca

SEQ ID NO: 39646 - DNA, 16 bp, Homo Sapiens
gttatcacgtctgctt

SEQ ID NO: 39647 - DNA, 17 bp, Homo Sapiens
gttatcacgtctgcttt

SEQ ID NO: 39648 - DNA, 16 bp, Homo Sapiens
gttatcacgttcgcct

SEQ ID NO: 39649 - DNA, 17 bp, Homo Sapiens
gttatcacgttcgcctc

SEQ ID NO: 39650 - DNA, 19 bp, Homo Sapiens
gttatcacgttcgcctcac

SEQ ID NO: 39651 - DNA, 34 bp, Homo Sapiens
gttatcacgttcgcctcacacgcgaaaggtcccc

SEQ ID NO: 39652 - DNA, 35 bp, Homo Sapiens
gttatcacgttcgcctcacacgcgaaaggtccccg

SEQ ID NO: 39653 - DNA, 36 bp, Homo Sapiens
gttatcacgttcgcctcacacgcgaaaggtccccgg

SEQ ID NO: 39654 - DNA, 21 bp, Homo Sapiens
gttcaaatcacgtcggggtca

SEQ ID NO: 39655 - DNA, 22 bp, Homo Sapiens
gttcaaatcacgtcggggtcac

SEQ ID NO: 39656 - DNA, 23 bp, Homo Sapiens
gttcaaatcacgtcggggtcacc

SEQ ID NO: 39657 - DNA, 16 bp, Homo Sapiens
gttcaaatccaggtgc

SEQ ID NO: 39658 - DNA, 17 bp, Homo Sapiens
gttcaaatccaggtgcc

SEQ ID NO: 39659 - DNA, 18 bp, Homo Sapiens
gttcaaatccaggtgccc

SEQ ID NO: 39660 - DNA, 22 bp, Homo Sapiens
gttcaaatccaggtgccccctc

SEQ ID NO: 39661 - DNA, 23 bp, Homo Sapiens
gttcaaatccaggtgccccctcc

SEQ ID NO: 39662 - DNA, 16 bp, Homo Sapiens
gttcaaatcccggacg

SEQ ID NO: 39663 - DNA, 17 bp, Homo Sapiens
gttcaaatcccggacga

SEQ ID NO: 39664 - DNA, 18 bp, Homo Sapiens
gttcaaatcccggacgag

SEQ ID NO: 39665 - DNA, 19 bp, Homo Sapiens
gttcaaatcccggacgagc

SEQ ID NO: 39666 - DNA, 20 bp, Homo Sapiens
gttcaaatcccggacgagcc

SEQ ID NO: 39667 - DNA, 21 bp, Homo Sapiens
gttcaaatcccggacgagccc

SEQ ID NO: 39668 - DNA, 22 bp, Homo Sapiens
gttcaaatcccggacgagcccc

SEQ ID NO: 39669 - DNA, 23 bp, Homo Sapiens
gttcaaatcccggacgagccccc

SEQ ID NO: 39670 - DNA, 16 bp, Homo Sapiens
gttcaaatccgggtgc

SEQ ID NO: 39671 - DNA, 17 bp, Homo Sapiens
gttcaaatccgggtgcc

SEQ ID NO: 39672 - DNA, 18 bp, Homo Sapiens
gttcaaatccgggtgccc

SEQ ID NO: 39673 - DNA, 19 bp, Homo Sapiens
gttcaaatccgggtgcccc

SEQ ID NO: 39674 - DNA, 20 bp, Homo Sapiens
gttcaaatccgggtgccccc

SEQ ID NO: 39675 - DNA, 21 bp, Homo Sapiens
gttcaaatccgggtgcccccc

SEQ ID NO: 39676 - DNA, 21 bp, Homo Sapiens
gttcaaatccgggtgccccct

SEQ ID NO: 39677 - DNA, 22 bp, Homo Sapiens
gttcaaatccgggtgccccctc

SEQ ID NO: 39678 - DNA, 23 bp, Homo Sapiens
gttcaaatccgggtgccccctcc

SEQ ID NO: 39679 - DNA, 24 bp, Homo Sapiens
gttcaaatccgggtgccccctcca

SEQ ID NO: 39680 - DNA, 18 bp, Homo Sapiens
gttcaaatctcgctgggg

SEQ ID NO: 39681 - DNA, 19 bp, Homo Sapiens
gttcaaatctcgctggggc

SEQ ID NO: 39682 - DNA, 20 bp, Homo Sapiens
gttcaaatctcgctggggcc

SEQ ID NO: 39683 - DNA, 21 bp, Homo Sapiens
gttcaaatctcgctggggcct

SEQ ID NO: 39684 - DNA, 22 bp, Homo Sapiens
gttcaaatctcgctggggcctc

SEQ ID NO: 39685 - DNA, 23 bp, Homo Sapiens
gttcaaatctcgctggggcctcc

SEQ ID NO: 39686 - DNA, 21 bp, Homo Sapiens
gttcaaatctcggtggaacct

SEQ ID NO: 39687 - DNA, 22 bp, Homo Sapiens
gttcaaatctcggtggaacctc

SEQ ID NO: 39688 - DNA, 23 bp, Homo Sapiens
gttcaaatctcggtggaacctcc

SEQ ID NO: 39689 - DNA, 21 bp, Homo Sapiens
gttcaaatctcggtgggacct

SEQ ID NO: 39690 - DNA, 22 bp, Homo Sapiens
gttcaaatctcggtgggacctc

SEQ ID NO: 39691 - DNA, 23 bp, Homo Sapiens
gttcaaatctcggtgggacctcc

SEQ ID NO: 39692 - DNA, 21 bp, Homo Sapiens
gttcaagtcacgtcggggtca

SEQ ID NO: 39693 - DNA, 22 bp, Homo Sapiens
gttcaagtcacgtcggggtcac

SEQ ID NO: 39694 - DNA, 23 bp, Homo Sapiens
gttcaagtcacgtcggggtcacc

SEQ ID NO: 39695 - DNA, 22 bp, Homo Sapiens
gttcaagtccctgtccaggcgc

SEQ ID NO: 39696 - DNA, 20 bp, Homo Sapiens
gttcaagtccctgttcgggc

SEQ ID NO: 39697 - DNA, 21 bp, Homo Sapiens
gttcaagtccctgttcgggcg

SEQ ID NO: 39698 - DNA, 22 bp, Homo Sapiens
gttcaagtccctgttcgggcgc

SEQ ID NO: 39699 - DNA, 23 bp, Homo Sapiens
gttcaagtccctgttcgggcgcc

SEQ ID NO: 39700 - DNA, 24 bp, Homo Sapiens
gttcaagtccctgttcgggcgcca

SEQ ID NO: 39701 - DNA, 16 bp, Homo Sapiens
gttcaatccccggcac

SEQ ID NO: 39702 - DNA, 17 bp, Homo Sapiens
gttcaatccccggcacc

SEQ ID NO: 39703 - DNA, 18 bp, Homo Sapiens
gttcaatccccggcacct

SEQ ID NO: 39704 - DNA, 19 bp, Homo Sapiens
gttcaatccccggcacctc

SEQ ID NO: 39705 - DNA, 21 bp, Homo Sapiens
gttcaatccccggcacctcca

SEQ ID NO: 39706 - DNA, 22 bp, Homo Sapiens
gttcaatccccggcacctccac

SEQ ID NO: 39707 - DNA, 23 bp, Homo Sapiens
gttcaatccccggcacctccacc

SEQ ID NO: 39708 - DNA, 24 bp, Homo Sapiens
gttcaatccccggcacctccacca

SEQ ID NO: 39709 - DNA, 17 bp, Homo Sapiens
gttcaatccccggcatc

SEQ ID NO: 39710 - DNA, 18 bp, Homo Sapiens
gttcaatccccggcatct

SEQ ID NO: 39711 - DNA, 20 bp, Homo Sapiens
gttcaatccccggcatctcc

SEQ ID NO: 39712 - DNA, 22 bp, Homo Sapiens
gttcaatccccggcatctccac

SEQ ID NO: 39713 - DNA, 23 bp, Homo Sapiens
gttcaatccccggcatctccacc

SEQ ID NO: 39714 - DNA, 22 bp, Homo Sapiens
gttcaatcccgggtttcggcac

SEQ ID NO: 39715 - DNA, 23 bp, Homo Sapiens
gttcaatcccgggtttcggcacc

SEQ ID NO: 39716 - DNA, 16 bp, Homo Sapiens
gttcaattccccgacg

SEQ ID NO: 39717 - DNA, 21 bp, Homo Sapiens
gttcaattccccgacggggag

SEQ ID NO: 39718 - DNA, 22 bp, Homo Sapiens
gttcaattccccgacggggagc

SEQ ID NO: 39719 - DNA, 23 bp, Homo Sapiens
gttcaattccccgacggggagcc

SEQ ID NO: 39720 - DNA, 24 bp, Homo Sapiens
gttcaattccccgacggggagcca

SEQ ID NO: 39721 - DNA, 18 bp, Homo Sapiens
gttcaggtcgcagtctcc

SEQ ID NO: 39722 - DNA, 19 bp, Homo Sapiens
gttcaggtcgcagtctccc

SEQ ID NO: 39723 - DNA, 16 bp, Homo Sapiens
gttcagtggtagaatt

SEQ ID NO: 39724 - DNA, 17 bp, Homo Sapiens
gttcagtggtagaattc

SEQ ID NO: 39725 - DNA, 19 bp, Homo Sapiens
gttcagtggtagaattctc

SEQ ID NO: 39726 - DNA, 20 bp, Homo Sapiens
gttcagtggtagaattctcg

SEQ ID NO: 39727 - DNA, 21 bp, Homo Sapiens
gttcagtggtagaattctcgc

SEQ ID NO: 39728 - DNA, 22 bp, Homo Sapiens
gttcagtggtagaattctcgcc

SEQ ID NO: 39729 - DNA, 23 bp, Homo Sapiens
gttcagtggtagaattctcgcct

SEQ ID NO: 39730 - DNA, 24 bp, Homo Sapiens
gttcagtggtagaattctcgcctc

SEQ ID NO: 39731 - DNA, 24 bp, Homo Sapiens
gttcagtggtagaattctcgcctg

SEQ ID NO: 39732 - DNA, 25 bp, Homo Sapiens
gttcagtggtagaattctcgcctgc

SEQ ID NO: 39733 - DNA, 26 bp, Homo Sapiens
gttcagtggtagaattctcgcctgcc

SEQ ID NO: 39734 - DNA, 27 bp, Homo Sapiens
gttcagtggtagaattctcgcctgcca

SEQ ID NO: 39735 - DNA, 39 bp, Homo Sapiens; identical to SEQ ID NO: 21949

SEQ ID NO: 39736 - DNA, 40 bp, Homo Sapiens; identical to SEQ ID NO: 21950

SEQ ID NO: 39737 - DNA, 41 bp, Homo Sapiens; identical to SEQ ID NO: 21951

SEQ ID NO: 39738 - DNA, 24 bp, Homo Sapiens
gttcagtggtagaattctcgcctt

SEQ ID NO: 39739 - DNA, 31 bp, Homo Sapiens; identical to SEQ ID NO: 21968

SEQ ID NO: 39740 - DNA, 32 bp, Homo Sapiens; identical to SEQ ID NO: 21969

SEQ ID NO: 39741 - DNA, 33 bp, Homo Sapiens; identical to SEQ ID NO: 21970

SEQ ID NO: 39742 - DNA, 28 bp, Homo Sapiens
gttccatagtgtagtggttatcacgtct

SEQ ID NO: 39743 - DNA, 30 bp, Homo Sapiens; identical to SEQ ID NO: 21980

SEQ ID NO: 39744 - DNA, 31 bp, Homo Sapiens; identical to SEQ ID NO: 21981

SEQ ID NO: 39745 - DNA, 32 bp, Homo Sapiens; identical to SEQ ID NO: 21982

SEQ ID NO: 39746 - DNA, 32 bp, Homo Sapiens; identical to SEQ ID NO: 21997

SEQ ID NO: 39747 - DNA, 29 bp, Homo Sapiens
gttccgggttcgagtcccggcggagtcgc

SEQ ID NO: 39748 - DNA, 30 bp, Homo Sapiens; identical to SEQ ID NO: 22006

SEQ ID NO: 39749 - DNA, 23 bp, Homo Sapiens
gttcgaaaccgggcagaagcacc

SEQ ID NO: 39750 - DNA, 16 bp, Homo Sapiens
gttcgaaaccgggcgg

SEQ ID NO: 39751 - DNA, 17 bp, Homo Sapiens
gttcgaaaccgggcgga

SEQ ID NO: 39752 - DNA, 18 bp, Homo Sapiens
gttcgaaaccgggcggaa

SEQ ID NO: 39753 - DNA, 19 bp, Homo Sapiens
gttcgaaaccgggcggaaa

SEQ ID NO: 39754 - DNA, 20 bp, Homo Sapiens
gttcgaaaccgggcggaaac

SEQ ID NO: 39755 - DNA, 21 bp, Homo Sapiens
gttcgaaaccgggcggaaaca

SEQ ID NO: 39756 - DNA, 22 bp, Homo Sapiens
gttcgaaaccgggcggaaacac

SEQ ID NO: 39757 - DNA, 23 bp, Homo Sapiens
gttcgaaaccgggcggaaacacc

SEQ ID NO: 39758 - DNA, 24 bp, Homo Sapiens
gttcgaaaccgggcggaaacacca

SEQ ID NO: 39759 - DNA, 16 bp, Homo Sapiens
gttcgaaccccactcc

SEQ ID NO: 39760 - DNA, 17 bp, Homo Sapiens
gttcgaaccccactcct

SEQ ID NO: 39761 - DNA, 22 bp, Homo Sapiens
gttcgaaccccactcctggtac

SEQ ID NO: 39762 - DNA, 23 bp, Homo Sapiens
gttcgaaccccactcctggtacc

SEQ ID NO: 39763 - DNA, 24 bp, Homo Sapiens
gttcgaaccccactcctggtacca

SEQ ID NO: 39764 - DNA, 23 bp, Homo Sapiens
gttcgaaccccgtacgggccacc

SEQ ID NO: 39765 - DNA, 20 bp, Homo Sapiens
gttcgaaccccgtccgtgcc

SEQ ID NO: 39766 - DNA, 21 bp, Homo Sapiens
gttcgaaccccgtccgtgcct

SEQ ID NO: 39767 - DNA, 22 bp, Homo Sapiens
gttcgaaccccgtccgtgcctc

SEQ ID NO: 39768 - DNA, 23 bp, Homo Sapiens
gttcgaaccccgtccgtgcctcc

SEQ ID NO: 39769 - DNA, 24 bp, Homo Sapiens
gttcgaaccccgtccgtgcctcca

SEQ ID NO: 39770 - DNA, 23 bp, Homo Sapiens
gttcgaaccctgctcgctgcgcc

SEQ ID NO: 39771 - DNA, 21 bp, Homo Sapiens
gttcgaacctcagagggggca

SEQ ID NO: 39772 - DNA, 22 bp, Homo Sapiens
gttcgaacctcagagggggcac

SEQ ID NO: 39773 - DNA, 23 bp, Homo Sapiens
gttcgaacctcagagggggcacc

SEQ ID NO: 39774 - DNA, 24 bp, Homo Sapiens
gttcgaacctcagagggggcacca

SEQ ID NO: 39775 - DNA, 21 bp, Homo Sapiens
gttcgaatcacgtcggggtca

SEQ ID NO: 39776 - DNA, 22 bp, Homo Sapiens
gttcgaatcacgtcggggtcac

SEQ ID NO: 39777 - DNA, 23 bp, Homo Sapiens
gttcgaatcacgtcggggtcacc

SEQ ID NO: 39778 - DNA, 22 bp, Homo Sapiens
gttcgaatcccaccactgccac

SEQ ID NO: 39779 - DNA, 23 bp, Homo Sapiens
gttcgaatcccaccactgccacc

SEQ ID NO: 39780 - DNA, 22 bp, Homo Sapiens
gttcgaatcccaccagagtcgc

SEQ ID NO: 39781 - DNA, 23 bp, Homo Sapiens
gttcgaatcccaccagagtcgcc

SEQ ID NO: 39782 - DNA, 23 bp, Homo Sapiens
gttcgaatcccaccctcgtcgcc

SEQ ID NO: 39783 - DNA, 16 bp, Homo Sapiens
gttcgaatcccaccgc

SEQ ID NO: 39784 - DNA, 20 bp, Homo Sapiens
gttcgaatcccaccgctgcc

SEQ ID NO: 39785 - DNA, 21 bp, Homo Sapiens
gttcgaatcccaccgctgcca

SEQ ID NO: 39786 - DNA, 22 bp, Homo Sapiens
gttcgaatcccaccgctgccac

SEQ ID NO: 39787 - DNA, 23 bp, Homo Sapiens
gttcgaatcccaccgctgccacc

SEQ ID NO: 39788 - DNA, 23 bp, Homo Sapiens
gttcgaatcccaccttcgtcgcc

SEQ ID NO: 39789 - DNA, 16 bp, Homo Sapiens
gttcgaatcccactcc

SEQ ID NO: 39790 - DNA, 21 bp, Homo Sapiens
gttcgaatcccactcctgaca

SEQ ID NO: 39791 - DNA, 22 bp, Homo Sapiens
gttcgaatcccactcctgacac

SEQ ID NO: 39792 - DNA, 23 bp, Homo Sapiens
gttcgaatcccactcctgacacc

SEQ ID NO: 39793 - DNA, 16 bp, Homo Sapiens
gttcgaatcccacttc

SEQ ID NO: 39794 - DNA, 21 bp, Homo Sapiens
gttcgaatcccacttctgaca

SEQ ID NO: 39795 - DNA, 22 bp, Homo Sapiens
gttcgaatcccacttctgacac

SEQ ID NO: 39796 - DNA, 23 bp, Homo Sapiens
gttcgaatcccacttctgacacc

SEQ ID NO: 39797 - DNA, 24 bp, Homo Sapiens
gttcgaatcccacttctgacacca

SEQ ID NO: 39798 - DNA, 21 bp, Homo Sapiens
gttcgaatcccagcgaggcct

SEQ ID NO: 39799 - DNA, 16 bp, Homo Sapiens
gttcgaatcccagcgg

SEQ ID NO: 39800 - DNA, 20 bp, Homo Sapiens
gttcgaatcccagcggggcc

SEQ ID NO: 39801 - DNA, 21 bp, Homo Sapiens
gttcgaatcccagcggggcct

SEQ ID NO: 39802 - DNA, 22 bp, Homo Sapiens
gttcgaatcccagcggggcctc

SEQ ID NO: 39803 - DNA, 23 bp, Homo Sapiens
gttcgaatcccagcggggcctcc

SEQ ID NO: 39804 - DNA, 18 bp, Homo Sapiens
gttcgaatcccagcggtg

SEQ ID NO: 39805 - DNA, 20 bp, Homo Sapiens
gttcgaatcccagcggtgcc

SEQ ID NO: 39806 - DNA, 21 bp, Homo Sapiens
gttcgaatcccagcggtgcct

SEQ ID NO: 39807 - DNA, 22 bp, Homo Sapiens
gttcgaatcccagcggtgcctc

SEQ ID NO: 39808 - DNA, 23 bp, Homo Sapiens
gttcgaatcccagcggtgcctcc

SEQ ID NO: 39809 - DNA, 21 bp, Homo Sapiens
gttcgaatcccagtagagcct

SEQ ID NO: 39810 - DNA, 21 bp, Homo Sapiens
gttcgaatcccatcctcgtcg

SEQ ID NO: 39811 - DNA, 22 bp, Homo Sapiens
gttcgaatcccatcctcgtcgc

SEQ ID NO: 39812 - DNA, 23 bp, Homo Sapiens
gttcgaatcccatcctcgtcgcc

SEQ ID NO: 39813 - DNA, 24 bp, Homo Sapiens
gttcgaatcccatcctcgtcgcca

SEQ ID NO: 39814 - DNA, 21 bp, Homo Sapiens
gttcgaatccctccgtggtta

SEQ ID NO: 39815 - DNA, 23 bp, Homo Sapiens
gttcgaatccctccgtggttacc

SEQ ID NO: 39816 - DNA, 16 bp, Homo Sapiens
gttcgaatcccttcgt

SEQ ID NO: 39817 - DNA, 21 bp, Homo Sapiens
gttcgaatcccttcgtggttg

SEQ ID NO: 39818 - DNA, 22 bp, Homo Sapiens
gttcgaatcccttcgtggttgc

SEQ ID NO: 39819 - DNA, 23 bp, Homo Sapiens
gttcgaatcccttcgtggttgcc

SEQ ID NO: 39820 - DNA, 24 bp, Homo Sapiens
gttcgaatcccttcgtggttgcca

SEQ ID NO: 39821 - DNA, 19 bp, Homo Sapiens
gttcgaatccgagtcacgg

SEQ ID NO: 39822 - DNA, 20 bp, Homo Sapiens
gttcgaatccgagtcacggc

SEQ ID NO: 39823 - DNA, 21 bp, Homo Sapiens
gttcgaatccgagtcacggca

SEQ ID NO: 39824 - DNA, 22 bp, Homo Sapiens
gttcgaatccgagtcacggcac

SEQ ID NO: 39825 - DNA, 23 bp, Homo Sapiens
gttcgaatccgagtcacggcacc

SEQ ID NO: 39826 - DNA, 24 bp, Homo Sapiens
gttcgaatccgagtcacggcacca

SEQ ID NO: 39827 - DNA, 16 bp, Homo Sapiens
gttcgaatccggctcg

SEQ ID NO: 39828 - DNA, 21 bp, Homo Sapiens
gttcgaatccggctcgaagga

SEQ ID NO: 39829 - DNA, 22 bp, Homo Sapiens
gttcgaatccggctcgaaggac

SEQ ID NO: 39830 - DNA, 23 bp, Homo Sapiens
gttcgaatccggctcgaaggacc

SEQ ID NO: 39831 - DNA, 22 bp, Homo Sapiens
gttcgaatccggctcggaggac

SEQ ID NO: 39832 - DNA, 23 bp, Homo Sapiens
gttcgaatccggctcggaggacc

SEQ ID NO: 39833 - DNA, 22 bp, Homo Sapiens
gttcgaatcctgccgactacgc

SEQ ID NO: 39834 - DNA, 23 bp, Homo Sapiens
gttcgaatcctgccgactacgcc

SEQ ID NO: 39835 - DNA, 24 bp, Homo Sapiens
gttcgaatcctgccgactacgcca

SEQ ID NO: 39836 - DNA, 23 bp, Homo Sapiens
gttcgaatcctgctcacagcgcc

SEQ ID NO: 39837 - DNA, 21 bp, Homo Sapiens
gttcgaatcctgttcgtgacg

SEQ ID NO: 39838 - DNA, 23 bp, Homo Sapiens
gttcgaatcctgttcgtgacgcc

SEQ ID NO: 39839 - DNA, 22 bp, Homo Sapiens
gttcgaatctcggtgggacctc

SEQ ID NO: 39840 - DNA, 21 bp, Homo Sapiens
gttcgactcccagtggggcct

SEQ ID NO: 39841 - DNA, 16 bp, Homo Sapiens
gttcgactcccggtat

SEQ ID NO: 39842 - DNA, 20 bp, Homo Sapiens
gttcgactcccggtatggga

SEQ ID NO: 39843 - DNA, 21 bp, Homo Sapiens
gttcgactcccggtatgggaa

SEQ ID NO: 39844 - DNA, 22 bp, Homo Sapiens
gttcgactcccggtatgggaac

SEQ ID NO: 39845 - DNA, 23 bp, Homo Sapiens
gttcgactcccggtatgggaacc

SEQ ID NO: 39846 - DNA, 16 bp, Homo Sapiens
gttcgactcccggtgt

SEQ ID NO: 39847 - DNA, 17 bp, Homo Sapiens
gttcgactcccggtgtg

SEQ ID NO: 39848 - DNA, 18 bp, Homo Sapiens
gttcgactcccggtgtgg

SEQ ID NO: 39849 - DNA, 19 bp, Homo Sapiens
gttcgactcccggtgtggg

SEQ ID NO: 39850 - DNA, 20 bp, Homo Sapiens
gttcgactcccggtgtggga

SEQ ID NO: 39851 - DNA, 21 bp, Homo Sapiens
gttcgactcccggtgtgggaa

SEQ ID NO: 39852 - DNA, 22 bp, Homo Sapiens
gttcgactcccggtgtgggaac

SEQ ID NO: 39853 - DNA, 23 bp, Homo Sapiens
gttcgactcccggtgtgggaacc

SEQ ID NO: 39854 - DNA, 24 bp, Homo Sapiens
gttcgactcccggtgtgggaacca

SEQ ID NO: 39855 - DNA, 22 bp, Homo Sapiens
gttcgactcctggctggctcgc

SEQ ID NO: 39856 - DNA, 23 bp, Homo Sapiens
gttcgactcctggctggctcgcc

SEQ ID NO: 39857 - DNA, 24 bp, Homo Sapiens
gttcgactcctggctggctcgcca

SEQ ID NO: 39858 - DNA, 22 bp, Homo Sapiens
gttcgagcccacccagggacgc

SEQ ID NO: 39859 - DNA, 23 bp, Homo Sapiens
gttcgagcccacccagggacgcc

SEQ ID NO: 39860 - DNA, 24 bp, Homo Sapiens
gttcgagcccacccagggacgcca

SEQ ID NO: 39861 - DNA, 16 bp, Homo Sapiens
gttcgagccccacgtt

SEQ ID NO: 39862 - DNA, 20 bp, Homo Sapiens
gttcgagccccacgttgggc

SEQ ID NO: 39863 - DNA, 21 bp, Homo Sapiens
gttcgagccccacgttgggcg

SEQ ID NO: 39864 - DNA, 22 bp, Homo Sapiens
gttcgagccccacgttgggcgc

SEQ ID NO: 39865 - DNA, 23 bp, Homo Sapiens
gttcgagccccacgttgggcgcc

SEQ ID NO: 39866 - DNA, 24 bp, Homo Sapiens
gttcgagccccacgttgggcgcca

SEQ ID NO: 39867 - DNA, 16 bp, Homo Sapiens
gttcgagccccagtgg

SEQ ID NO: 39868 - DNA, 17 bp, Homo Sapiens
gttcgagccccagtgga

SEQ ID NO: 39869 - DNA, 18 bp, Homo Sapiens
gttcgagccccagtggaa

SEQ ID NO: 39870 - DNA, 19 bp, Homo Sapiens
gttcgagccccagtggaac

SEQ ID NO: 39871 - DNA, 20 bp, Homo Sapiens
gttcgagccccagtggaacc

SEQ ID NO: 39872 - DNA, 21 bp, Homo Sapiens
gttcgagccccagtggaacca

SEQ ID NO: 39873 - DNA, 22 bp, Homo Sapiens
gttcgagccccagtggaaccac

SEQ ID NO: 39874 - DNA, 23 bp, Homo Sapiens
gttcgagccccagtggaaccacc

SEQ ID NO: 39875 - DNA, 20 bp, Homo Sapiens
gttcgagcctcacacggggc

SEQ ID NO: 39876 - DNA, 21 bp, Homo Sapiens
gttcgagcctcacacggggca

SEQ ID NO: 39877 - DNA, 22 bp, Homo Sapiens
gttcgagcctcacacggggcac

SEQ ID NO: 39878 - DNA, 23 bp, Homo Sapiens
gttcgagcctcacacggggcacc

SEQ ID NO: 39879 - DNA, 21 bp, Homo Sapiens
gttcgagcctcacctggagca

SEQ ID NO: 39880 - DNA, 22 bp, Homo Sapiens
gttcgagcctcacctggagcac

SEQ ID NO: 39881 - DNA, 23 bp, Homo Sapiens
gttcgagcctcacctggagcacc

SEQ ID NO: 39882 - DNA, 21 bp, Homo Sapiens
gttcgagcctcagagagggca

SEQ ID NO: 39883 - DNA, 22 bp, Homo Sapiens
gttcgagcctcagagagggcac

SEQ ID NO: 39884 - DNA, 23 bp, Homo Sapiens
gttcgagcctcagagagggcacc

SEQ ID NO: 39885 - DNA, 23 bp, Homo Sapiens
gttcgagtcccaccagagtcgcc

SEQ ID NO: 39886 - DNA, 17 bp, Homo Sapiens
gttcgagtcccacccgg

SEQ ID NO: 39887 - DNA, 16 bp, Homo Sapiens
gttcgagtcccacctg

SEQ ID NO: 39888 - DNA, 24 bp, Homo Sapiens
gttcgagtcccacctggggtgcca

SEQ ID NO: 39889 - DNA, 19 bp, Homo Sapiens
gttcgagtcccatctgggg

SEQ ID NO: 39890 - DNA, 22 bp, Homo Sapiens
gttcgagtcccatctggggtgc

SEQ ID NO: 39891 - DNA, 23 bp, Homo Sapiens
gttcgagtcccatctggggtgcc

SEQ ID NO: 39892 - DNA, 24 bp, Homo Sapiens
gttcgagtcccatctggggtgcca

SEQ ID NO: 39893 - DNA, 21 bp, Homo Sapiens
gttcgagtcccatctgggtcg

SEQ ID NO: 39894 - DNA, 23 bp, Homo Sapiens
gttcgagtcccatctgggtcgcc

SEQ ID NO: 39895 - DNA, 24 bp, Homo Sapiens
gttcgagtcccatctgggtcgcca

SEQ ID NO: 39896 - DNA, 24 bp, Homo Sapiens
gttcgagtcccggcagagatgcca

SEQ ID NO: 39897 - DNA, 22 bp, Homo Sapiens
gttcgagtcccggcggagtcgc

SEQ ID NO: 39898 - DNA, 23 bp, Homo Sapiens
gttcgagtcccggcggagtcgcc

SEQ ID NO: 39899 - DNA, 24 bp, Homo Sapiens
gttcgagtcccggcggagtcgcca

SEQ ID NO: 39900 - DNA, 16 bp, Homo Sapiens
gttcgagtcccttcgt

SEQ ID NO: 39901 - DNA, 21 bp, Homo Sapiens
gttcgagtcccttcgtggtcg

SEQ ID NO: 39902 - DNA, 22 bp, Homo Sapiens
gttcgagtcccttcgtggtcgc

SEQ ID NO: 39903 - DNA, 23 bp, Homo Sapiens
gttcgagtcccttcgtggtcgcc

SEQ ID NO: 39904 - DNA, 24 bp, Homo Sapiens
gttcgagtcccttcgtggtcgcca

SEQ ID NO: 39905 - DNA, 16 bp, Homo Sapiens
gttcgagtcctgccgc

SEQ ID NO: 39906 - DNA, 22 bp, Homo Sapiens
gttcgagtcctgccgcggtcgc

SEQ ID NO: 39907 - DNA, 23 bp, Homo Sapiens
gttcgagtcctgccgcggtcgcc

SEQ ID NO: 39908 - DNA, 24 bp, Homo Sapiens
gttcgagtcctgccgcggtcgcca

SEQ ID NO: 39909 - DNA, 23 bp, Homo Sapiens
gttcgatcccacccagggacgcc

SEQ ID NO: 39910 - DNA, 21 bp, Homo Sapiens
gttcgatccccagcatctcca

SEQ ID NO: 39911 - DNA, 22 bp, Homo Sapiens
gttcgatccccagcatctccac

SEQ ID NO: 39912 - DNA, 23 bp, Homo Sapiens
gttcgatccccagcatctccacc

SEQ ID NO: 39913 - DNA, 23 bp, Homo Sapiens
gttcgatccccagtacctccacc

SEQ ID NO: 39914 - DNA, 17 bp, Homo Sapiens
gttcgatccccggcacc

SEQ ID NO: 39915 - DNA, 18 bp, Homo Sapiens
gttcgatccccggcacct

SEQ ID NO: 39916 - DNA, 23 bp, Homo Sapiens
gttcgatccccggcacctccacc

SEQ ID NO: 39917 - DNA, 16 bp, Homo Sapiens
gttcgatccccggcat

SEQ ID NO: 39918 - DNA, 17 bp, Homo Sapiens
gttcgatccccggcatc

SEQ ID NO: 39919 - DNA, 18 bp, Homo Sapiens
gttcgatccccggcatct

SEQ ID NO: 39920 - DNA, 19 bp, Homo Sapiens
gttcgatccccggcatctc

SEQ ID NO: 39921 - DNA, 20 bp, Homo Sapiens
gttcgatccccggcatctcc

SEQ ID NO: 39922 - DNA, 21 bp, Homo Sapiens
gttcgatccccggcatctcca

SEQ ID NO: 39923 - DNA, 22 bp, Homo Sapiens
gttcgatccccggcatctccac

SEQ ID NO: 39924 - DNA, 23 bp, Homo Sapiens
gttcgatccccggcatctccacc

SEQ ID NO: 39925 - DNA, 24 bp, Homo Sapiens
gttcgatccccggcatctccacca

SEQ ID NO: 39926 - DNA, 19 bp, Homo Sapiens
gttcgatccccgtacgggc

SEQ ID NO: 39927 - DNA, 20 bp, Homo Sapiens
gttcgatccccgtacgggcc

SEQ ID NO: 39928 - DNA, 21 bp, Homo Sapiens
gttcgatccccgtacgggcca

SEQ ID NO: 39929 - DNA, 22 bp, Homo Sapiens
gttcgatccccgtacgggccac

SEQ ID NO: 39930 - DNA, 23 bp, Homo Sapiens
gttcgatccccgtacgggccacc

SEQ ID NO: 39931 - DNA, 21 bp, Homo Sapiens
gttcgatcccgggcggaaaca

SEQ ID NO: 39932 - DNA, 22 bp, Homo Sapiens
gttcgatcccgggcggaaacac

SEQ ID NO: 39933 - DNA, 20 bp, Homo Sapiens
gttcgatcccgggtttcggc

SEQ ID NO: 39934 - DNA, 21 bp, Homo Sapiens
gttcgatcccgggtttcggca

SEQ ID NO: 39935 - DNA, 22 bp, Homo Sapiens
gttcgatcccgggtttcggcac

SEQ ID NO: 39936 - DNA, 23 bp, Homo Sapiens
gttcgatcccgggtttcggcacc

SEQ ID NO: 39937 - DNA, 23 bp, Homo Sapiens
gttcgatcctcacacggggcacc

SEQ ID NO: 39938 - DNA, 22 bp, Homo Sapiens
gttcgatcctcacctggagcac

SEQ ID NO: 39939 - DNA, 23 bp, Homo Sapiens
gttcgatcctcacctggagcacc

SEQ ID NO: 39940 - DNA, 22 bp, Homo Sapiens
gttcgattccccaacggggagc

SEQ ID NO: 39941 - DNA, 23 bp, Homo Sapiens
gttcgattccccaacggggagcc

SEQ ID NO: 39942 - DNA, 16 bp, Homo Sapiens
gttcgattccccgacg

SEQ ID NO: 39943 - DNA, 17 bp, Homo Sapiens
gttcgattccccgacgg

SEQ ID NO: 39944 - DNA, 18 bp, Homo Sapiens
gttcgattccccgacggg

SEQ ID NO: 39945 - DNA, 19 bp, Homo Sapiens
gttcgattccccgacgggg

SEQ ID NO: 39946 - DNA, 20 bp, Homo Sapiens
gttcgattccccgacgggga

SEQ ID NO: 39947 - DNA, 21 bp, Homo Sapiens
gttcgattccccgacggggag

SEQ ID NO: 39948 - DNA, 22 bp, Homo Sapiens
gttcgattccccgacggggagc

SEQ ID NO: 39949 - DNA, 23 bp, Homo Sapiens
gttcgattccccgacggggagcc

SEQ ID NO: 39950 - DNA, 24 bp, Homo Sapiens
gttcgattccccgacggggagcca

SEQ ID NO: 39951 - DNA, 16 bp, Homo Sapiens
gttcgattcccggcca

SEQ ID NO: 39952 - DNA, 17 bp, Homo Sapiens
gttcgattcccggccaa

SEQ ID NO: 39953 - DNA, 18 bp, Homo Sapiens
gttcgattcccggccaac

SEQ ID NO: 39954 - DNA, 19 bp, Homo Sapiens
gttcgattcccggccaacg

SEQ ID NO: 39955 - DNA, 21 bp, Homo Sapiens
gttcgattcccggccaacgca

SEQ ID NO: 39956 - DNA, 22 bp, Homo Sapiens
gttcgattcccggccaacgcac

SEQ ID NO: 39957 - DNA, 23 bp, Homo Sapiens
gttcgattcccggccaacgcacc

SEQ ID NO: 39958 - DNA, 24 bp, Homo Sapiens
gttcgattcccggccaacgcacca

SEQ ID NO: 39959 - DNA, 18 bp, Homo Sapiens
gttcgattcccggccaat

SEQ ID NO: 39960 - DNA, 19 bp, Homo Sapiens
gttcgattcccggccaatg

SEQ ID NO: 39961 - DNA, 21 bp, Homo Sapiens
gttcgattcccggccaatgca

SEQ ID NO: 39962 - DNA, 22 bp, Homo Sapiens
gttcgattcccggccaatgcac

SEQ ID NO: 39963 - DNA, 23 bp, Homo Sapiens
gttcgattcccggccaatgcacc

SEQ ID NO: 39964 - DNA, 24 bp, Homo Sapiens
gttcgattcccggccaatgcacca

SEQ ID NO: 39965 - DNA, 16 bp, Homo Sapiens
gttcgattcccggccc

SEQ ID NO: 39966 - DNA, 19 bp, Homo Sapiens
gttcgattcccggcccatg

SEQ ID NO: 39967 - DNA, 23 bp, Homo Sapiens
gttcgattcccggcccatgcacc

SEQ ID NO: 39968 - DNA, 16 bp, Homo Sapiens
gttcgattcccgggcg

SEQ ID NO: 39969 - DNA, 18 bp, Homo Sapiens
gttcgattcccgggcggc

SEQ ID NO: 39970 - DNA, 20 bp, Homo Sapiens
gttcgattcccgggcggcgc

SEQ ID NO: 39971 - DNA, 21 bp, Homo Sapiens
gttcgattcccgggcggcgca

SEQ ID NO: 39972 - DNA, 22 bp, Homo Sapiens
gttcgattcccgggcggcgcac

SEQ ID NO: 39973 - DNA, 23 bp, Homo Sapiens
gttcgattcccgggcggcgcacc

SEQ ID NO: 39974 - DNA, 16 bp, Homo Sapiens
gttcgattcccggtca

SEQ ID NO: 39975 - DNA, 17 bp, Homo Sapiens
gttcgattcccggtcag

SEQ ID NO: 39976 - DNA, 18 bp, Homo Sapiens
gttcgattcccggtcagg

SEQ ID NO: 39977 - DNA, 19 bp, Homo Sapiens
gttcgattcccggtcaggg

SEQ ID NO: 39978 - DNA, 20 bp, Homo Sapiens
gttcgattcccggtcaggga

SEQ ID NO: 39979 - DNA, 21 bp, Homo Sapiens
gttcgattcccggtcagggaa

SEQ ID NO: 39980 - DNA, 22 bp, Homo Sapiens
gttcgattcccggtcagggaac

SEQ ID NO: 39981 - DNA, 23 bp, Homo Sapiens
gttcgattcccggtcagggaacc

SEQ ID NO: 39982 - DNA, 24 bp, Homo Sapiens
gttcgattcccggtcagggaacca

SEQ ID NO: 39983 - DNA, 21 bp, Homo Sapiens
gttcgattcccggtcatggaa

SEQ ID NO: 39984 - DNA, 22 bp, Homo Sapiens
gttcgattcccggtcatggaac

SEQ ID NO: 39985 - DNA, 16 bp, Homo Sapiens
gttcgattccggctcg

SEQ ID NO: 39986 - DNA, 22 bp, Homo Sapiens
gttcgattccggctcgaaggac

SEQ ID NO: 39987 - DNA, 23 bp, Homo Sapiens
gttcgattccggctcgaaggacc

SEQ ID NO: 39988 - DNA, 16 bp, Homo Sapiens
gttcgattccttcctt

SEQ ID NO: 39989 - DNA, 23 bp, Homo Sapiens
gttcgattccttccttttttgcc

SEQ ID NO: 39990 - DNA, 24 bp, Homo Sapiens
gttcgattccttccttttttgcca

SEQ ID NO: 39991 - DNA, 18 bp, Homo Sapiens
gttcgattctcatagtcc

SEQ ID NO: 39992 - DNA, 19 bp, Homo Sapiens
gttcgattctcatagtcct

SEQ ID NO: 39993 - DNA, 21 bp, Homo Sapiens
gttcgattctcatagtcctag

SEQ ID NO: 39994 - DNA, 22 bp, Homo Sapiens
gttcgattctcatagtcctagc

SEQ ID NO: 39995 - DNA, 23 bp, Homo Sapiens
gttcgattctcatagtcctagcc

SEQ ID NO: 39996 - DNA, 24 bp, Homo Sapiens
gttcgattctcatagtcctagcca

SEQ ID NO: 39997 - DNA, 16 bp, Homo Sapiens
gttctggtctccggat

SEQ ID NO: 39998 - DNA, 21 bp, Homo Sapiens
gttctggtctccggatggagg

SEQ ID NO: 39999 - DNA, 16 bp, Homo Sapiens
gttcttgtagttgaaa

SEQ ID NO: 40000 - DNA, 17 bp, Homo Sapiens
gttcttgtagttgaaat

SEQ ID NO: 40001 - DNA, 18 bp, Homo Sapiens
gttcttgtagttgaaata

SEQ ID NO: 40002 - DNA, 19 bp, Homo Sapiens
gttcttgtagttgaaatac

SEQ ID NO: 40003 - DNA, 20 bp, Homo Sapiens
gttcttgtagttgaaataca

SEQ ID NO: 40004 - DNA, 22 bp, Homo Sapiens
gttcttgtagttgaaatacaac

SEQ ID NO: 40005 - DNA, 23 bp, Homo Sapiens
gttcttgtagttgaaatacaacg

SEQ ID NO: 40006 - DNA, 24 bp, Homo Sapiens
gttcttgtagttgaaatacaacga

SEQ ID NO: 40007 - DNA, 25 bp, Homo Sapiens
gttcttgtagttgaaatacaacgat

SEQ ID NO: 40008 - DNA, 26 bp, Homo Sapiens
gttcttgtagttgaaatacaacgatg

SEQ ID NO: 40009 - DNA, 27 bp, Homo Sapiens
gttcttgtagttgaaatacaacgatgg

SEQ ID NO: 40010 - DNA, 28 bp, Homo Sapiens
gttcttgtagttgaaatacaacgatggt

SEQ ID NO: 40011 - DNA, 29 bp, Homo Sapiens
gttcttgtagttgaaatacaacgatggtt

SEQ ID NO: 40012 - DNA, 32 bp, Homo Sapiens; identical to SEQ ID NO: 22222

SEQ ID NO: 40013 - DNA, 33 bp, Homo Sapiens; identical to SEQ ID NO: 22223

SEQ ID NO: 40014 - DNA, 34 bp, Homo Sapiens; identical to SEQ ID NO: 22224

SEQ ID NO: 40015 - DNA, 35 bp, Homo Sapiens; identical to SEQ ID NO: 22225

SEQ ID NO: 40016 - DNA, 36 bp, Homo Sapiens; identical to SEQ ID NO: 22226

SEQ ID NO: 40017 - DNA, 38 bp, Homo Sapiens; identical to SEQ ID NO: 22228

SEQ ID NO: 40018 - DNA, 39 bp, Homo Sapiens; identical to SEQ ID NO: 22229

SEQ ID NO: 40019 - DNA, 40 bp, Homo Sapiens; identical to SEQ ID NO: 22230

SEQ ID NO: 40020 - DNA, 41 bp, Homo Sapiens; identical to SEQ ID NO: 22231

SEQ ID NO: 40021 - DNA, 43 bp, Homo Sapiens; identical to SEQ ID NO: 22233

SEQ ID NO: 40022 - DNA, 44 bp, Homo Sapiens; identical to SEQ ID NO: 22234

SEQ ID NO: 40023 - DNA, 45 bp, Homo Sapiens; identical to SEQ ID NO: 22235

SEQ ID NO: 40024 - DNA, 46 bp, Homo Sapiens; identical to SEQ ID NO: 22236

SEQ ID NO: 40025 - DNA, 16 bp, Homo Sapiens
gttgaaatccgggtgc

SEQ ID NO: 40026 - DNA, 22 bp, Homo Sapiens
gttgcaatacttaatttctgcc

SEQ ID NO: 40027 - DNA, 23 bp, Homo Sapiens
gttgcaatacttaatttctgcca

SEQ ID NO: 40028 - DNA, 21 bp, Homo Sapiens
gttgggagagcgttagactga

SEQ ID NO: 40029 - DNA, 22 bp, Homo Sapiens
gttgggagagcgttagactgaa

SEQ ID NO: 40030 - DNA, 18 bp, Homo Sapiens
gttggtagagcatcagac

SEQ ID NO: 40031 - DNA, 18 bp, Homo Sapiens
gttggtagagcggaggac

SEQ ID NO: 40032 - DNA, 27 bp, Homo Sapiens
gttggtctaggggtatgattctcgctt

SEQ ID NO: 40033 - DNA, 21 bp, Homo Sapiens
gttggtggtatagtggtgagc

SEQ ID NO: 40034 - DNA, 29 bp, Homo Sapiens
gttggtggtatagtggttagcatagctgc

SEQ ID NO: 40035 - DNA, 30 bp, Homo Sapiens; identical to SEQ ID NO: 22341

SEQ ID NO: 40036 - DNA, 34 bp, Homo Sapiens; identical to SEQ ID NO: 22345

SEQ ID NO: 40037 - DNA, 30 bp, Homo Sapiens; identical to SEQ ID NO: 22349

SEQ ID NO: 40038 - DNA, 27 bp, Homo Sapiens
gttggttatacccttcccgtactacca

SEQ ID NO: 40039 - DNA, 18 bp, Homo Sapiens
gttgtagtccgtgcgaga

SEQ ID NO: 40040 - DNA, 19 bp, Homo Sapiens
gttgtagtccgtgcgagaa

SEQ ID NO: 40041 - DNA, 20 bp, Homo Sapiens
gttgtagtccgtgcgagaat

SEQ ID NO: 40042 - DNA, 21 bp, Homo Sapiens
gttgtagtccgtgcgagaata

SEQ ID NO: 40043 - DNA, 23 bp, Homo Sapiens
gttgtagtccgtgcgagaatacc

SEQ ID NO: 40044 - DNA, 24 bp, Homo Sapiens
gttgtagtccgtgcgagaatacca

SEQ ID NO: 40045 - DNA, 30 bp, Homo Sapiens; identical to SEQ ID NO: 22373

SEQ ID NO: 40046 - DNA, 30 bp, Homo Sapiens; identical to SEQ ID NO: 22375

SEQ ID NO: 40047 - DNA, 27 bp, Homo Sapiens
gtttaaacaaaacgaatgatttcgact

SEQ ID NO: 40048 - DNA, 28 bp, Homo Sapiens
gtttaaccaaaacatcagattgtgaatc

SEQ ID NO: 40049 - DNA, 42 bp, Homo Sapiens; identical to SEQ ID NO: 22411

SEQ ID NO: 40050 - DNA, 16 bp, Homo Sapiens
gtttaagtcccattgg

SEQ ID NO: 40051 - DNA, 18 bp, Homo Sapiens
gtttaagtcccattggtc

SEQ ID NO: 40052 - DNA, 23 bp, Homo Sapiens
gtttaagtcccattggtctagcc

SEQ ID NO: 40053 - DNA, 24 bp, Homo Sapiens
gtttaagtcccattggtctagcca

SEQ ID NO: 40054 - DNA, 16 bp, Homo Sapiens
gtttagacgggctcac

SEQ ID NO: 40055 - DNA, 17 bp, Homo Sapiens
gtttagacgggctcaca

SEQ ID NO: 40056 - DNA, 18 bp, Homo Sapiens
gtttagacgggctcacat

SEQ ID NO: 40057 - DNA, 19 bp, Homo Sapiens
gtttagacgggctcacatc

SEQ ID NO: 40058 - DNA, 20 bp, Homo Sapiens
gtttagacgggctcacatca

SEQ ID NO: 40059 - DNA, 22 bp, Homo Sapiens
gtttagacgggctcacatcacc

SEQ ID NO: 40060 - DNA, 23 bp, Homo Sapiens
gtttagacgggctcacatcaccc

SEQ ID NO: 40061 - DNA, 24 bp, Homo Sapiens
gtttagacgggctcacatcacccc

SEQ ID NO: 40062 - DNA, 25 bp, Homo Sapiens
gtttagacgggctcacatcacccca

SEQ ID NO: 40063 - DNA, 26 bp, Homo Sapiens
gtttagacgggctcacatcaccccat

SEQ ID NO: 40064 - DNA, 27 bp, Homo Sapiens
gtttagacgggctcacatcaccccata

SEQ ID NO: 40065 - DNA, 28 bp, Homo Sapiens
gtttagacgggctcacatcaccccataa

SEQ ID NO: 40066 - DNA, 29 bp, Homo Sapiens
gtttagacgggctcacatcaccccataaa

SEQ ID NO: 40067 - DNA, 31 bp, Homo Sapiens; identical to SEQ ID NO: 22435

SEQ ID NO: 40068 - DNA, 33 bp, Homo Sapiens; identical to SEQ ID NO: 22437

SEQ ID NO: 40069 - DNA, 34 bp, Homo Sapiens; identical to SEQ ID NO: 22438

SEQ ID NO: 40070 - DNA, 23 bp, Homo Sapiens
gtttagtggtagaattctcgcct

SEQ ID NO: 40071 - DNA, 16 bp, Homo Sapiens
gtttatgtagcttacc

SEQ ID NO: 40072 - DNA, 17 bp, Homo Sapiens
gtttatgtagcttacct

SEQ ID NO: 40073 - DNA, 18 bp, Homo Sapiens
gtttatgtagcttacctc

SEQ ID NO: 40074 - DNA, 19 bp, Homo Sapiens
gtttatgtagcttacctcc

SEQ ID NO: 40075 - DNA, 20 bp, Homo Sapiens
gtttatgtagcttacctcct

SEQ ID NO: 40076 - DNA, 21 bp, Homo Sapiens
gtttatgtagcttacctcctc

SEQ ID NO: 40077 - DNA, 30 bp, Homo Sapiens; identical to SEQ ID NO: 22453

SEQ ID NO: 40078 - DNA, 34 bp, Homo Sapiens; identical to SEQ ID NO: 22457

SEQ ID NO: 40079 - DNA, 35 bp, Homo Sapiens; identical to SEQ ID NO: 22458

SEQ ID NO: 40080 - DNA, 36 bp, Homo Sapiens; identical to SEQ ID NO: 22459

SEQ ID NO: 40081 - DNA, 37 bp, Homo Sapiens; identical to SEQ ID NO: 22460

SEQ ID NO: 40082 - DNA, 37 bp, Homo Sapiens
gtttccccgcacaggttcgaatcctgttcgtgacgcc

SEQ ID NO: 40083 - DNA, 37 bp, Homo Sapiens; identical to SEQ ID NO: 22466

SEQ ID NO: 40084 - DNA, 23 bp, Homo Sapiens
gtttccgtagtggagtggttatc

SEQ ID NO: 40085 - DNA, 31 bp, Homo Sapiens; identical to SEQ ID NO: 22472

SEQ ID NO: 40086 - DNA, 32 bp, Homo Sapiens; identical to SEQ ID NO: 22473

SEQ ID NO: 40087 - DNA, 33 bp, Homo Sapiens; identical to SEQ ID NO: 22474

SEQ ID NO: 40088 - DNA, 34 bp, Homo Sapiens; identical to SEQ ID NO: 22475

SEQ ID NO: 40089 - DNA, 16 bp, Homo Sapiens
gtttccgtagtgtagc

SEQ ID NO: 40090 - DNA, 17 bp, Homo Sapiens
gtttccgtagtgtagcg

SEQ ID NO: 40091 - DNA, 18 bp, Homo Sapiens
gtttccgtagtgtagcgg

SEQ ID NO: 40092 - DNA, 19 bp, Homo Sapiens
gtttccgtagtgtagcggt

SEQ ID NO: 40093 - DNA, 23 bp, Homo Sapiens
gtttccgtagtgtagcggttatc

SEQ ID NO: 40094 - DNA, 26 bp, Homo Sapiens
gtttccgtagtgtagcggttatcaca

SEQ ID NO: 40095 - DNA, 28 bp, Homo Sapiens
gtttccgtagtgtagcggttatcacatt

SEQ ID NO: 40096 - DNA, 29 bp, Homo Sapiens
gtttccgtagtgtagcggttatcacattc

SEQ ID NO: 40097 - DNA, 30 bp, Homo Sapiens; identical to SEQ ID NO: 22490

SEQ ID NO: 40098 - DNA, 31 bp, Homo Sapiens; identical to SEQ ID NO: 22491

SEQ ID NO: 40099 - DNA, 32 bp, Homo Sapiens; identical to SEQ ID NO: 22492

SEQ ID NO: 40100 - DNA, 33 bp, Homo Sapiens; identical to SEQ ID NO: 22493

SEQ ID NO: 40101 - DNA, 34 bp, Homo Sapiens; identical to SEQ ID NO: 22494

SEQ ID NO: 40102 - DNA, 35 bp, Homo Sapiens; identical to SEQ ID NO: 22495

SEQ ID NO: 40103 - DNA, 16 bp, Homo Sapiens
gtttccgtagtgtagt

SEQ ID NO: 40104 - DNA, 17 bp, Homo Sapiens
gtttccgtagtgtagtg

SEQ ID NO: 40105 - DNA, 18 bp, Homo Sapiens
gtttccgtagtgtagtgg

SEQ ID NO: 40106 - DNA, 19 bp, Homo Sapiens
gtttccgtagtgtagtggt

SEQ ID NO: 40107 - DNA, 20 bp, Homo Sapiens
gtttccgtagtgtagtggtc

SEQ ID NO: 40108 - DNA, 21 bp, Homo Sapiens
gtttccgtagtgtagtggtca

SEQ ID NO: 40109 - DNA, 22 bp, Homo Sapiens
gtttccgtagtgtagtggtcat

SEQ ID NO: 40110 - DNA, 23 bp, Homo Sapiens
gtttccgtagtgtagtggtcatc

SEQ ID NO: 40111 - DNA, 24 bp, Homo Sapiens
gtttccgtagtgtagtggtcatca

SEQ ID NO: 40112 - DNA, 25 bp, Homo Sapiens
gtttccgtagtgtagtggtcatcac

SEQ ID NO: 40113 - DNA, 26 bp, Homo Sapiens
gtttccgtagtgtagtggtcatcacg

SEQ ID NO: 40114 - DNA, 29 bp, Homo Sapiens
gtttccgtagtgtagtggtcatcacgttc

SEQ ID NO: 40115 - DNA, 30 bp, Homo Sapiens; identical to SEQ ID NO: 22515

SEQ ID NO: 40116 - DNA, 31 bp, Homo Sapiens; identical to SEQ ID NO: 22516

SEQ ID NO: 40117 - DNA, 32 bp, Homo Sapiens; identical to SEQ ID NO: 22517

SEQ ID NO: 40118 - DNA, 33 bp, Homo Sapiens; identical to SEQ ID NO: 22518

SEQ ID NO: 40119 - DNA, 34 bp, Homo Sapiens; identical to SEQ ID NO: 22519

SEQ ID NO: 40120 - DNA, 21 bp, Homo Sapiens
gtttccgtagtgtagtggtta

SEQ ID NO: 40121 - DNA, 22 bp, Homo Sapiens
gtttccgtagtgtagtggttat

SEQ ID NO: 40122 - DNA, 23 bp, Homo Sapiens
gtttccgtagtgtagtggttatc

SEQ ID NO: 40123 - DNA, 24 bp, Homo Sapiens
gtttccgtagtgtagtggttatca

SEQ ID NO: 40124 - DNA, 25 bp, Homo Sapiens
gtttccgtagtgtagtggttatcac

SEQ ID NO: 40125 - DNA, 26 bp, Homo Sapiens
gtttccgtagtgtagtggttatcacg

SEQ ID NO: 40126 - DNA, 27 bp, Homo Sapiens
gtttccgtagtgtagtggttatcacgt

SEQ ID NO: 40127 - DNA, 28 bp, Homo Sapiens
gtttccgtagtgtagtggttatcacgtt

SEQ ID NO: 40128 - DNA, 29 bp, Homo Sapiens
gtttccgtagtgtagtggttatcacgttc

SEQ ID NO: 40129 - DNA, 30 bp, Homo Sapiens; identical to SEQ ID NO: 22533

SEQ ID NO: 40130 - DNA, 31 bp, Homo Sapiens; identical to SEQ ID NO: 22534

SEQ ID NO: 40131 - DNA, 32 bp, Homo Sapiens; identical to SEQ ID NO: 22535

SEQ ID NO: 40132 - DNA, 33 bp, Homo Sapiens; identical to SEQ ID NO: 22536

SEQ ID NO: 40133 - DNA, 34 bp, Homo Sapiens; identical to SEQ ID NO: 22537

SEQ ID NO: 40134 - DNA, 34 bp, Homo Sapiens; identical to SEQ ID NO: 22542

SEQ ID NO: 40135 - DNA, 35 bp, Homo Sapiens; identical to SEQ ID NO: 22543

SEQ ID NO: 40136 - DNA, 36 bp, Homo Sapiens; identical to SEQ ID NO: 22544

SEQ ID NO: 40137 - DNA, 37 bp, Homo Sapiens; identical to SEQ ID NO: 22545

SEQ ID NO: 40138 - DNA, 38 bp, Homo Sapiens; identical to SEQ ID NO: 22546

SEQ ID NO: 40139 - DNA, 39 bp, Homo Sapiens; identical to SEQ ID NO: 22547

SEQ ID NO: 40140 - DNA, 40 bp, Homo Sapiens; identical to SEQ ID NO: 22548

SEQ ID NO: 40141 - DNA, 41 bp, Homo Sapiens; identical to SEQ ID NO: 22549

SEQ ID NO: 40142 - DNA, 42 bp, Homo Sapiens; identical to SEQ ID NO: 22550

SEQ ID NO: 40143 - DNA, 43 bp, Homo Sapiens; identical to SEQ ID NO: 22551

SEQ ID NO: 40144 - DNA, 32 bp, Homo Sapiens; identical to SEQ ID NO: 22553

SEQ ID NO: 40145 - DNA, 33 bp, Homo Sapiens; identical to SEQ ID NO: 22554

SEQ ID NO: 40146 - DNA, 23 bp, Homo Sapiens
gtttccgtggtgtagtggttatc

SEQ ID NO: 40147 - DNA, 33 bp, Homo Sapiens; identical to SEQ ID NO: 22561

SEQ ID NO: 40148 - DNA, 22 bp, Homo Sapiens
gtttgtgggtttaagtcccatt

SEQ ID NO: 40149 - DNA, 30 bp, Homo Sapiens; identical to SEQ ID NO: 22572

SEQ ID NO: 40150 - DNA, 31 bp, Homo Sapiens; identical to SEQ ID NO: 22573

SEQ ID NO: 40151 - DNA, 32 bp, Homo Sapiens; identical to SEQ ID NO: 22574

SEQ ID NO: 40152 - DNA, 42 bp, Homo Sapiens; identical to SEQ ID NO: 22581

SEQ ID NO: 40153 - DNA, 43 bp, Homo Sapiens; identical to SEQ ID NO: 22582

SEQ ID NO: 40154 - DNA, 44 bp, Homo Sapiens; identical to SEQ ID NO: 22583

SEQ ID NO: 40155 - DNA, 45 bp, Homo Sapiens; identical to SEQ ID NO: 22584

SEQ ID NO: 40156 - DNA, 28 bp, Homo Sapiens
gttttgacaacattcaaaaaagagtacc

SEQ ID NO: 40157 - DNA, 17 bp, Homo Sapiens
gttttgcagtccttacc

SEQ ID NO: 40158 - DNA, 19 bp, Homo Sapiens
gtttttcatatcattggtc

SEQ ID NO: 40159 - DNA, 21 bp, Homo Sapiens
gtttttcatatcattggtcgt

SEQ ID NO: 40160 - DNA, 31 bp, Homo Sapiens; identical to SEQ ID NO: 22605

SEQ ID NO: 40161 - DNA, 32 bp, Homo Sapiens; identical to SEQ ID NO: 22606

SEQ ID NO: 40162 - DNA, 34 bp, Homo Sapiens; identical to SEQ ID NO: 22608

SEQ ID NO: 40163 - DNA, 35 bp, Homo Sapiens; identical to SEQ ID NO: 22609

SEQ ID NO: 40164 - DNA, 36 bp, Homo Sapiens; identical to SEQ ID NO: 22610

SEQ ID NO: 40165 - DNA, 38 bp, Homo Sapiens; identical to SEQ ID NO: 22612

SEQ ID NO: 40166 - DNA, 39 bp, Homo Sapiens; identical to SEQ ID NO: 22613

SEQ ID NO: 40167 - DNA, 40 bp, Homo Sapiens; identical to SEQ ID NO: 22614

SEQ ID NO: 40168 - DNA, 41 bp, Homo Sapiens; identical to SEQ ID NO: 22615

SEQ ID NO: 40169 - DNA, 42 bp, Homo Sapiens; identical to SEQ ID NO: 22616

SEQ ID NO: 40170 - DNA, 43 bp, Homo Sapiens; identical to SEQ ID NO: 22617

SEQ ID NO: 40171 - DNA, 45 bp, Homo Sapiens; identical to SEQ ID NO: 22619

SEQ ID NO: 40172 - DNA, 46 bp, Homo Sapiens; identical to SEQ ID NO: 22620

SEQ ID NO: 40173 - DNA, 35 bp, Homo Sapiens
taaaaggttggtggttcgaacccacccagaggcgc

SEQ ID NO: 40174 - DNA, 36 bp, Homo Sapiens
taaaaggttggtggttcgaacccacccagaggcgcc

SEQ ID NO: 40175 - DNA, 27 bp, Homo Sapiens
taaaatggctgagtgaagcattggact

SEQ ID NO: 40176 - DNA, 21 bp, Homo Sapiens
taaacaggagatcctgggttc

SEQ ID NO: 40177 - DNA, 22 bp, Homo Sapiens
taaacaggagatcctgggttcg

SEQ ID NO: 40178 - DNA, 23 bp, Homo Sapiens
taaacaggagatcctgggttcga

SEQ ID NO: 40179 - DNA, 36 bp, Homo Sapiens; identical to SEQ ID NO: 22678

SEQ ID NO: 40180 - DNA, 38 bp, Homo Sapiens; identical to SEQ ID NO: 22680

SEQ ID NO: 40181 - DNA, 39 bp, Homo Sapiens; identical to SEQ ID NO: 22681

SEQ ID NO: 40182 - DNA, 40 bp, Homo Sapiens; identical to SEQ ID NO: 22682

SEQ ID NO: 40183 - DNA, 41 bp, Homo Sapiens; identical to SEQ ID NO: 22683

SEQ ID NO: 40184 - DNA, 36 bp, Homo Sapiens; identical to SEQ ID NO: 22686

SEQ ID NO: 40185 - DNA, 38 bp, Homo Sapiens; identical to SEQ ID NO: 22688

SEQ ID NO: 40186 - DNA, 39 bp, Homo Sapiens; identical to SEQ ID NO: 22689

SEQ ID NO: 40187 - DNA, 40 bp, Homo Sapiens; identical to SEQ ID NO: 22690

SEQ ID NO: 40188 - DNA, 41 bp, Homo Sapiens; identical to SEQ ID NO: 22691

SEQ ID NO: 40189 - DNA, 17 bp, Homo Sapiens
taaaccaggggtcgcga

SEQ ID NO: 40190 - DNA, 38 bp, Homo Sapiens; identical to SEQ ID NO: 22704

SEQ ID NO: 40191 - DNA, 39 bp, Homo Sapiens
taaaccaggggtcgcgagttcaaatctcgctggggcctc

SEQ ID NO: 40192 - DNA, 40 bp, Homo Sapiens; identical to SEQ ID NO: 22705

SEQ ID NO: 40193 - DNA, 39 bp, Homo Sapiens; identical to SEQ ID NO: 22718

SEQ ID NO: 40194 - DNA, 19 bp, Homo Sapiens
taaaccgaagatcgcgggt

SEQ ID NO: 40195 - DNA, 22 bp, Homo Sapiens
taaaccgaagatcgcgggttcg

SEQ ID NO: 40196 - DNA, 23 bp, Homo Sapiens
taaaccgaagatcgcgggttcga

SEQ ID NO: 40197 - DNA, 39 bp, Homo Sapiens; identical to SEQ ID NO: 22728

SEQ ID NO: 40198 - DNA, 18 bp, Homo Sapiens
taaaccggagatgaaaac

SEQ ID NO: 40199 - DNA, 19 bp, Homo Sapiens
taaaccggagatgaaaacc

SEQ ID NO: 40200 - DNA, 32 bp, Homo Sapiens; identical to SEQ ID NO: 22744

SEQ ID NO: 40201 - DNA, 34 bp, Homo Sapiens; identical to SEQ ID NO: 22746

SEQ ID NO: 40202 - DNA, 35 bp, Homo Sapiens; identical to SEQ ID NO: 22747

SEQ ID NO: 40203 - DNA, 36 bp, Homo Sapiens; identical to SEQ ID NO: 22748

SEQ ID NO: 40204 - DNA, 32 bp, Homo Sapiens; identical to SEQ ID NO: 22763

SEQ ID NO: 40205 - DNA, 33 bp, Homo Sapiens; identical to SEQ ID NO: 22764

SEQ ID NO: 40206 - DNA, 18 bp, Homo Sapiens
taaagactttttctctga

SEQ ID NO: 40207 - DNA, 19 bp, Homo Sapiens
taaagactttttctctgac

SEQ ID NO: 40208 - DNA, 20 bp, Homo Sapiens
taaagactttttctctgacc

SEQ ID NO: 40209 - DNA, 21 bp, Homo Sapiens
taaagactttttctctgacca

SEQ ID NO: 40210 - DNA, 17 bp, Homo Sapiens
taaagattaagagaacc

SEQ ID NO: 40211 - DNA, 35 bp, Homo Sapiens; identical to SEQ ID NO: 22790

SEQ ID NO: 40212 - DNA, 36 bp, Homo Sapiens; identical to SEQ ID NO: 22791

SEQ ID NO: 40213 - DNA, 37 bp, Homo Sapiens; identical to SEQ ID NO: 22792

SEQ ID NO: 40214 - DNA, 38 bp, Homo Sapiens; identical to SEQ ID NO: 22793

SEQ ID NO: 40215 - DNA, 26 bp, Homo Sapiens
taaaggataacagctatccattggtc

SEQ ID NO: 40216 - DNA, 34 bp, Homo Sapiens
taaaggtccctggttcaatcccgggtttcggcac

SEQ ID NO: 40217 - DNA, 33 bp, Homo Sapiens
taaaggtccctggttcgatcccgggtttcggca

SEQ ID NO: 40218 - DNA, 34 bp, Homo Sapiens; identical to SEQ ID NO: 22802

SEQ ID NO: 40219 - DNA, 35 bp, Homo Sapiens; identical to SEQ ID NO: 22803

SEQ ID NO: 40220 - DNA, 17 bp, Homo Sapiens
taaagtggctgatttgc

SEQ ID NO: 40221 - DNA, 16 bp, Homo Sapiens
taaataagctatcggg

SEQ ID NO: 40222 - DNA, 19 bp, Homo Sapiens
taaataagctatcgggccc

SEQ ID NO: 40223 - DNA, 27 bp, Homo Sapiens
taaataataggagcttaaaccccctta

SEQ ID NO: 40224 - DNA, 35 bp, Homo Sapiens; identical to SEQ ID NO: 22844

SEQ ID NO: 40225 - DNA, 36 bp, Homo Sapiens; identical to SEQ ID NO: 22845

SEQ ID NO: 40226 - DNA, 22 bp, Homo Sapiens
taaatacagaccaagagccttc

SEQ ID NO: 40227 - DNA, 32 bp, Homo Sapiens; identical to SEQ ID NO: 22857

SEQ ID NO: 40228 - DNA, 38 bp, Homo Sapiens; identical to SEQ ID NO: 22885

SEQ ID NO: 40229 - DNA, 39 bp, Homo Sapiens; identical to SEQ ID NO: 22886

SEQ ID NO: 40230 - DNA, 22 bp, Homo Sapiens
taacaacatggctttctcacca

SEQ ID NO: 40231 - DNA, 20 bp, Homo Sapiens
taaccaaaacatcagattgt

SEQ ID NO: 40232 - DNA, 24 bp, Homo Sapiens
taaccaaaacatcagattgtgaat

SEQ ID NO: 40233 - DNA, 25 bp, Homo Sapiens
taaccaaaacatcagattgtgaatc

SEQ ID NO: 40234 - DNA, 17 bp, Homo Sapiens
taacccagaggtcgatg

SEQ ID NO: 40235 - DNA, 19 bp, Homo Sapiens
taacccagaggtcgatgga

SEQ ID NO: 40236 - DNA, 20 bp, Homo Sapiens
taacccagaggtcgatggat

SEQ ID NO: 40237 - DNA, 21 bp, Homo Sapiens
taacccagaggtcgatggatc

SEQ ID NO: 40238 - DNA, 22 bp, Homo Sapiens
taacccagaggtcgatggatcg

SEQ ID NO: 40239 - DNA, 23 bp, Homo Sapiens
taacccagaggtcgatggatcga

SEQ ID NO: 40240 - DNA, 22 bp, Homo Sapiens
taaccgaaaggttggtggttcg

SEQ ID NO: 40241 - DNA, 23 bp, Homo Sapiens
taaccgaaaggttggtggttcga

SEQ ID NO: 40242 - DNA, 37 bp, Homo Sapiens; identical to SEQ ID NO: 22997

SEQ ID NO: 40243 - DNA, 40 bp, Homo Sapiens; identical to SEQ ID NO: 23000

SEQ ID NO: 40244 - DNA, 40 bp, Homo Sapiens
taaccgaaaggttggtggttcgatcccacccagggacgcc

SEQ ID NO: 40245 - DNA, 30 bp, Homo Sapiens; identical to SEQ ID NO: 23003

SEQ ID NO: 40246 - DNA, 21 bp, Homo Sapiens
taacgccaaggtcgcgggttc

SEQ ID NO: 40247 - DNA, 22 bp, Homo Sapiens
taacgccaaggtcgcgggttcg

SEQ ID NO: 40248 - DNA, 23 bp, Homo Sapiens
taacgccaaggtcgcgggttcga

SEQ ID NO: 40249 - DNA, 24 bp, Homo Sapiens
taacgccaaggtcgcgggttcgat

SEQ ID NO: 40250 - DNA, 40 bp, Homo Sapiens; identical to SEQ ID NO: 23028

SEQ ID NO: 40251 - DNA, 41 bp, Homo Sapiens; identical to SEQ ID NO: 23029

SEQ ID NO: 40252 - DNA, 32 bp, Homo Sapiens; identical to SEQ ID NO: 23068

SEQ ID NO: 40253 - DNA, 16 bp, Homo Sapiens
taacttgaccgctctg

SEQ ID NO: 40254 - DNA, 17 bp, Homo Sapiens
taacttgaccgctctga

SEQ ID NO: 40255 - DNA, 18 bp, Homo Sapiens
taacttgaccgctctgac

SEQ ID NO: 40256 - DNA, 19 bp, Homo Sapiens
taacttgaccgctctgacc

SEQ ID NO: 40257 - DNA, 20 bp, Homo Sapiens
taacttgaccgctctgacca

SEQ ID NO: 40258 - DNA, 29 bp, Homo Sapiens
taagagaaccaacacctctttacagtgac

SEQ ID NO: 40259 - DNA, 30 bp, Homo Sapiens; identical to SEQ ID NO: 23119

SEQ ID NO: 40260 - DNA, 31 bp, Homo Sapiens; identical to SEQ ID NO: 23120

SEQ ID NO: 40261 - DNA, 17 bp, Homo Sapiens
taagatccaatggacat

SEQ ID NO: 40262 - DNA, 19 bp, Homo Sapiens
taagccagggattgtgggt

SEQ ID NO: 40263 - DNA, 21 bp, Homo Sapiens
taagccagggattgtgggttc

SEQ ID NO: 40264 - DNA, 22 bp, Homo Sapiens
taagccagggattgtgggttcg

SEQ ID NO: 40265 - DNA, 40 bp, Homo Sapiens; identical to SEQ ID NO: 23179

SEQ ID NO: 40266 - DNA, 41 bp, Homo Sapiens; identical to SEQ ID NO: 23180

SEQ ID NO: 40267 - DNA, 20 bp, Homo Sapiens
taagctatcgggcccatacc

SEQ ID NO: 40268 - DNA, 23 bp, Homo Sapiens
taagctatcgggcccataccccg

SEQ ID NO: 40269 - DNA, 24 bp, Homo Sapiens
taagctatcgggcccataccccga

SEQ ID NO: 40270 - DNA, 25 bp, Homo Sapiens
taagctatcgggcccataccccgaa

SEQ ID NO: 40271 - DNA, 26 bp, Homo Sapiens
taagctatcgggcccataccccgaaa

SEQ ID NO: 40272 - DNA, 35 bp, Homo Sapiens; identical to SEQ ID NO: 23200

SEQ ID NO: 40273 - DNA, 27 bp, Homo Sapiens
taaggtcagctaaataagctatcgggc

SEQ ID NO: 40274 - DNA, 28 bp, Homo Sapiens
taaggtcagctaaataagctatcgggcc

SEQ ID NO: 40275 - DNA, 29 bp, Homo Sapiens
taaggtcagctaaataagctatcgggccc

SEQ ID NO: 40276 - DNA, 30 bp, Homo Sapiens; identical to SEQ ID NO: 23225

SEQ ID NO: 40277 - DNA, 21 bp, Homo Sapiens
taagtcccattggtctagcca

SEQ ID NO: 40278 - DNA, 35 bp, Homo Sapiens; identical to SEQ ID NO: 23255

SEQ ID NO: 40279 - DNA, 22 bp, Homo Sapiens
taagttaaagattaagagaacc

SEQ ID NO: 40280 - DNA, 43 bp, Homo Sapiens; identical to SEQ ID NO: 23281

SEQ ID NO: 40281 - DNA, 41 bp, Homo Sapiens; identical to SEQ ID NO: 23309

SEQ ID NO: 40282 - DNA, 42 bp, Homo Sapiens; identical to SEQ ID NO: 23322

SEQ ID NO: 40283 - DNA, 40 bp, Homo Sapiens; identical to SEQ ID NO: 23336

SEQ ID NO: 40284 - DNA, 37 bp, Homo Sapiens; identical to SEQ ID NO: 23347

SEQ ID NO: 40285 - DNA, 39 bp, Homo Sapiens; identical to SEQ ID NO: 23349

SEQ ID NO: 40286 - DNA, 40 bp, Homo Sapiens; identical to SEQ ID NO: 23350

SEQ ID NO: 40287 - DNA, 41 bp, Homo Sapiens; identical to SEQ ID NO: 23351

SEQ ID NO: 40288 - DNA, 16 bp, Homo Sapiens
taatctgaaggtcgtg

SEQ ID NO: 40289 - DNA, 19 bp, Homo Sapiens
taatctgaaggtcgtgagt

SEQ ID NO: 40290 - DNA, 38 bp, Homo Sapiens; identical to SEQ ID NO: 23363

SEQ ID NO: 40291 - DNA, 39 bp, Homo Sapiens; identical to SEQ ID NO: 23364

SEQ ID NO: 40292 - DNA, 40 bp, Homo Sapiens; identical to SEQ ID NO: 23365

SEQ ID NO: 40293 - DNA, 41 bp, Homo Sapiens; identical to SEQ ID NO: 23366

SEQ ID NO: 40294 - DNA, 37 bp, Homo Sapiens
taatctgaaggtcgtgagttcgatcctcacacggggc

SEQ ID NO: 40295 - DNA, 39 bp, Homo Sapiens; identical to SEQ ID NO: 23370

SEQ ID NO: 40296 - DNA, 40 bp, Homo Sapiens; identical to SEQ ID NO: 23371

SEQ ID NO: 40297 - DNA, 41 bp, Homo Sapiens; identical to SEQ ID NO: 23372

SEQ ID NO: 40298 - DNA, 21 bp, Homo Sapiens
taatgccgaggttgtgagttc

SEQ ID NO: 40299 - DNA, 16 bp, Homo Sapiens
taatggataaggcact

SEQ ID NO: 40300 - DNA, 17 bp, Homo Sapiens
taatggataaggcactg

SEQ ID NO: 40301 - DNA, 19 bp, Homo Sapiens
taatggataaggcactggc

SEQ ID NO: 40302 - DNA, 16 bp, Homo Sapiens
taatggataaggcatc

SEQ ID NO: 40303 - DNA, 19 bp, Homo Sapiens
taatggataaggcatcagc

SEQ ID NO: 40304 - DNA, 21 bp, Homo Sapiens
taatggataaggcatcagcct

SEQ ID NO: 40305 - DNA, 23 bp, Homo Sapiens
taatggataaggcatcagcctcc

SEQ ID NO: 40306 - DNA, 30 bp, Homo Sapiens; identical to SEQ ID NO: 23400

SEQ ID NO: 40307 - DNA, 38 bp, Homo Sapiens
taatggataaggcatcagcctccggagctggggattgt

SEQ ID NO: 40308 - DNA, 16 bp, Homo Sapiens
taatggataaggcatt

SEQ ID NO: 40309 - DNA, 17 bp, Homo Sapiens
taatggataaggcattg

SEQ ID NO: 40310 - DNA, 19 bp, Homo Sapiens
taatggataaggcattggc

SEQ ID NO: 40311 - DNA, 16 bp, Homo Sapiens
taatggataaggcgtc

SEQ ID NO: 40312 - DNA, 19 bp, Homo Sapiens
taatggataaggcgtctga

SEQ ID NO: 40313 - DNA, 21 bp, Homo Sapiens
taatggataaggcgtctgact

SEQ ID NO: 40314 - DNA, 21 bp, Homo Sapiens
taatggataaggcgtctgatt

SEQ ID NO: 40315 - DNA, 31 bp, Homo Sapiens
taatggtgagcactctggactctgaatccag

SEQ ID NO: 40316 - DNA, 30 bp, Homo Sapiens; identical to SEQ ID NO: 23439

SEQ ID NO: 40317 - DNA, 31 bp, Homo Sapiens; identical to SEQ ID NO: 23440

SEQ ID NO: 40318 - DNA, 32 bp, Homo Sapiens; identical to SEQ ID NO: 23441

SEQ ID NO: 40319 - DNA, 17 bp, Homo Sapiens
taatggttagcactctg

SEQ ID NO: 40320 - DNA, 18 bp, Homo Sapiens
taatggttagcactctgg

SEQ ID NO: 40321 - DNA, 19 bp, Homo Sapiens
taatggttagcactctgga

SEQ ID NO: 40322 - DNA, 21 bp, Homo Sapiens
taatggttagcactctggact

SEQ ID NO: 40323 - DNA, 22 bp, Homo Sapiens
taatggttagcactctggactc

SEQ ID NO: 40324 - DNA, 23 bp, Homo Sapiens
taatggttagcactctggactct

SEQ ID NO: 40325 - DNA, 24 bp, Homo Sapiens
taatggttagcactctggactctg

SEQ ID NO: 40326 - DNA, 25 bp, Homo Sapiens
taatggttagcactctggactctga

SEQ ID NO: 40327 - DNA, 26 bp, Homo Sapiens
taatggttagcactctggactctgaa

SEQ ID NO: 40328 - DNA, 27 bp, Homo Sapiens
taatggttagcactctggactctgaat

SEQ ID NO: 40329 - DNA, 28 bp, Homo Sapiens
taatggttagcactctggactctgaatc

SEQ ID NO: 40330 - DNA, 29 bp, Homo Sapiens
taatggttagcactctggactctgaatcc

SEQ ID NO: 40331 - DNA, 30 bp, Homo Sapiens; identical to SEQ ID NO: 23456

SEQ ID NO: 40332 - DNA, 31 bp, Homo Sapiens
taatggttagcactctggactctgaatccag

SEQ ID NO: 40333 - DNA, 32 bp, Homo Sapiens
taatggttagcactctggactctgaatccagc

SEQ ID NO: 40334 - DNA, 33 bp, Homo Sapiens; identical to SEQ ID NO: 23457

SEQ ID NO: 40335 - DNA, 40 bp, Homo Sapiens; identical to SEQ ID NO: 23458

SEQ ID NO: 40336 - DNA, 41 bp, Homo Sapiens; identical to SEQ ID NO: 23459

SEQ ID NO: 40337 - DNA, 44 bp, Homo Sapiens; identical to SEQ ID NO: 23461

SEQ ID NO: 40338 - DNA, 24 bp, Homo Sapiens
taatggttagcactctggactttg

SEQ ID NO: 40339 - DNA, 26 bp, Homo Sapiens
taatggttagcactctggactttgaa

SEQ ID NO: 40340 - DNA, 28 bp, Homo Sapiens
taatggttagcactctggactttgaatc

SEQ ID NO: 40341 - DNA, 41 bp, Homo Sapiens
taatggttagcactctggactttgaatccagcgatccgagt

SEQ ID NO: 40342 - DNA, 16 bp, Homo Sapiens
taattaaagtggctga

SEQ ID NO: 40343 - DNA, 16 bp, Homo Sapiens
taattcaaaggttccg

SEQ ID NO: 40344 - DNA, 40 bp, Homo Sapiens; identical to SEQ ID NO: 23474

SEQ ID NO: 40345 - DNA, 41 bp, Homo Sapiens; identical to SEQ ID NO: 23475

SEQ ID NO: 40346 - DNA, 40 bp, Homo Sapiens; identical to SEQ ID NO: 23476

SEQ ID NO: 40347 - DNA, 41 bp, Homo Sapiens; identical to SEQ ID NO: 23477

SEQ ID NO: 40348 - DNA, 40 bp, Homo Sapiens
taattcaaaggttgtgggttcgagtcccaccagagtcgcc

SEQ ID NO: 40349 - DNA, 40 bp, Homo Sapiens; identical to SEQ ID NO: 23490

SEQ ID NO: 40350 - DNA, 41 bp, Homo Sapiens; identical to SEQ ID NO: 23491

SEQ ID NO: 40351 - DNA, 18 bp, Homo Sapiens
tacacgcagaaggtcctg

SEQ ID NO: 40352 - DNA, 42 bp, Homo Sapiens; identical to SEQ ID NO: 23499

SEQ ID NO: 40353 - DNA, 25 bp, Homo Sapiens
tacactgaaaatgtttagacgggct

SEQ ID NO: 40354 - DNA, 37 bp, Homo Sapiens; identical to SEQ ID NO: 23534

SEQ ID NO: 40355 - DNA, 38 bp, Homo Sapiens; identical to SEQ ID NO: 23535

SEQ ID NO: 40356 - DNA, 39 bp, Homo Sapiens; identical to SEQ ID NO: 23536

SEQ ID NO: 40357 - DNA, 40 bp, Homo Sapiens; identical to SEQ ID NO: 23537

SEQ ID NO: 40358 - DNA, 41 bp, Homo Sapiens; identical to SEQ ID NO: 23538

SEQ ID NO: 40359 - DNA, 39 bp, Homo Sapiens; identical to SEQ ID NO: 23572

SEQ ID NO: 40360 - DNA, 20 bp, Homo Sapiens
tacgaccccttatttacccc

SEQ ID NO: 40361 - DNA, 21 bp, Homo Sapiens
tacgaccccttatttacccca

SEQ ID NO: 40362 - DNA, 17 bp, Homo Sapiens
tactctgcgttgtggcc

SEQ ID NO: 40363 - DNA, 18 bp, Homo Sapiens
tactctgcgttgtggccg

SEQ ID NO: 40364 - DNA, 19 bp, Homo Sapiens
tactctgcgttgtggccgc

SEQ ID NO: 40365 - DNA, 16 bp, Homo Sapiens
tacttaatttctgcca

SEQ ID NO: 40366 - DNA, 40 bp, Homo Sapiens; identical to SEQ ID NO: 23636

SEQ ID NO: 40367 - DNA, 41 bp, Homo Sapiens; identical to SEQ ID NO: 23637

SEQ ID NO: 40368 - DNA, 32 bp, Homo Sapiens; identical to SEQ ID NO: 23641

SEQ ID NO: 40369 - DNA, 16 bp, Homo Sapiens
tagaattctcgcctgc

SEQ ID NO: 40370 - DNA, 17 bp, Homo Sapiens
tagaattctcgcctgcc

SEQ ID NO: 40371 - DNA, 18 bp, Homo Sapiens
tagaattctcgcctgcca

SEQ ID NO: 40372 - DNA, 19 bp, Homo Sapiens
tagaattctcgcctgccac

SEQ ID NO: 40373 - DNA, 20 bp, Homo Sapiens
tagaattctcgcctgccacg

SEQ ID NO: 40374 - DNA, 21 bp, Homo Sapiens
tagaattctcgcctgccacgc

SEQ ID NO: 40375 - DNA, 25 bp, Homo Sapiens
tagaattctcgcctgccacgcggga

SEQ ID NO: 40376 - DNA, 30 bp, Homo Sapiens; identical to SEQ ID NO: 23652

SEQ ID NO: 40377 - DNA, 32 bp, Homo Sapiens; identical to SEQ ID NO: 23654

SEQ ID NO: 40378 - DNA, 33 bp, Homo Sapiens; identical to SEQ ID NO: 23655

SEQ ID NO: 40379 - DNA, 34 bp, Homo Sapiens; identical to SEQ ID NO: 23656

SEQ ID NO: 40380 - DNA, 16 bp, Homo Sapiens
tagacgggctcacatc

SEQ ID NO: 40381 - DNA, 19 bp, Homo Sapiens
tagacgggctcacatcacc

SEQ ID NO: 40382 - DNA, 30 bp, Homo Sapiens; identical to SEQ ID NO: 23674

SEQ ID NO: 40383 - DNA, 31 bp, Homo Sapiens; identical to SEQ ID NO: 23675

SEQ ID NO: 40384 - DNA, 22 bp, Homo Sapiens
tagagcatgagactcttaatct

SEQ ID NO: 40385 - DNA, 23 bp, Homo Sapiens
tagagcatgagactcttaatctc

SEQ ID NO: 40386 - DNA, 30 bp, Homo Sapiens; identical to SEQ ID NO: 23689

SEQ ID NO: 40387 - DNA, 32 bp, Homo Sapiens; identical to SEQ ID NO: 23691

SEQ ID NO: 40388 - DNA, 33 bp, Homo Sapiens; identical to SEQ ID NO: 23692

SEQ ID NO: 40389 - DNA, 34 bp, Homo Sapiens; identical to SEQ ID NO: 23693

SEQ ID NO: 40390 - DNA, 35 bp, Homo Sapiens; identical to SEQ ID NO: 23694

SEQ ID NO: 40391 - DNA, 36 bp, Homo Sapiens; identical to SEQ ID NO: 23695

SEQ ID NO: 40392 - DNA, 38 bp, Homo Sapiens; identical to SEQ ID NO: 23697

SEQ ID NO: 40393 - DNA, 44 bp, Homo Sapiens; identical to SEQ ID NO: 23699

SEQ ID NO: 40394 - DNA, 16 bp, Homo Sapiens
tagagcatgggactct

SEQ ID NO: 40395 - DNA, 20 bp, Homo Sapiens
tagagcatgggactcttaat

SEQ ID NO: 40396 - DNA, 21 bp, Homo Sapiens
tagagcatgggactcttaatc

SEQ ID NO: 40397 - DNA, 22 bp, Homo Sapiens
tagagcatgggactcttaatcc

SEQ ID NO: 40398 - DNA, 23 bp, Homo Sapiens
tagagcatgggactcttaatccc

SEQ ID NO: 40399 - DNA, 30 bp, Homo Sapiens; identical to SEQ ID NO: 23708

SEQ ID NO: 40400 - DNA, 32 bp, Homo Sapiens; identical to SEQ ID NO: 23710

SEQ ID NO: 40401 - DNA, 33 bp, Homo Sapiens; identical to SEQ ID NO: 23711

SEQ ID NO: 40402 - DNA, 34 bp, Homo Sapiens; identical to SEQ ID NO: 23712

SEQ ID NO: 40403 - DNA, 35 bp, Homo Sapiens; identical to SEQ ID NO: 23713

SEQ ID NO: 40404 - DNA, 36 bp, Homo Sapiens; identical to SEQ ID NO: 23714

SEQ ID NO: 40405 - DNA, 37 bp, Homo Sapiens
tagagcatgggactcttaatcccagggtcgtgggttc

SEQ ID NO: 40406 - DNA, 38 bp, Homo Sapiens; identical to SEQ ID NO: 23715

SEQ ID NO: 40407 - DNA, 42 bp, Homo Sapiens; identical to SEQ ID NO: 23716

SEQ ID NO: 40408 - DNA, 44 bp, Homo Sapiens; identical to SEQ ID NO: 23717

SEQ ID NO: 40409 - DNA, 36 bp, Homo Sapiens; identical to SEQ ID NO: 23724

SEQ ID NO: 40410 - DNA, 16 bp, Homo Sapiens
tagagcatttgactgc

SEQ ID NO: 40411 - DNA, 20 bp, Homo Sapiens
tagagtaaataataggagct

SEQ ID NO: 40412 - DNA, 23 bp, Homo Sapiens
tagatccttaggtcgctggttcg

SEQ ID NO: 40413 - DNA, 16 bp, Homo Sapiens
tagcactctggactct

SEQ ID NO: 40414 - DNA, 17 bp, Homo Sapiens
tagcactctggactctg

SEQ ID NO: 40415 - DNA, 18 bp, Homo Sapiens
tagcactctggactctga

SEQ ID NO: 40416 - DNA, 19 bp, Homo Sapiens
tagcactctggactctgaa

SEQ ID NO: 40417 - DNA, 20 bp, Homo Sapiens
tagcactctggactctgaat

SEQ ID NO: 40418 - DNA, 21 bp, Homo Sapiens
tagcactctggactctgaatc

SEQ ID NO: 40419 - DNA, 22 bp, Homo Sapiens
tagcactctggactctgaatcc

SEQ ID NO: 40420 - DNA, 23 bp, Homo Sapiens
tagcactctggactctgaatcca

SEQ ID NO: 40421 - DNA, 24 bp, Homo Sapiens
tagcactctggactctgaatccag

SEQ ID NO: 40422 - DNA, 25 bp, Homo Sapiens
tagcactctggactctgaatccagc

SEQ ID NO: 40423 - DNA, 26 bp, Homo Sapiens
tagcactctggactctgaatccagcg

SEQ ID NO: 40424 - DNA, 29 bp, Homo Sapiens
tagcactctggactctgaatccagcgatc

SEQ ID NO: 40425 - DNA, 30 bp, Homo Sapiens
tagcactctggactctgaatccagcgatcc

SEQ ID NO: 40426 - DNA, 32 bp, Homo Sapiens; identical to SEQ ID NO: 23786

SEQ ID NO: 40427 - DNA, 33 bp, Homo Sapiens; identical to SEQ ID NO: 23787

SEQ ID NO: 40428 - DNA, 34 bp, Homo Sapiens; identical to SEQ ID NO: 23788

SEQ ID NO: 40429 - DNA, 35 bp, Homo Sapiens; identical to SEQ ID NO: 23789

SEQ ID NO: 40430 - DNA, 36 bp, Homo Sapiens; identical to SEQ ID NO: 23790

SEQ ID NO: 40431 - DNA, 37 bp, Homo Sapiens; identical to SEQ ID NO: 23791

SEQ ID NO: 40432 - DNA, 45 bp, Homo Sapiens; identical to SEQ ID NO: 23794

SEQ ID NO: 40433 - DNA, 18 bp, Homo Sapiens
tagcactctggactttga

SEQ ID NO: 40434 - DNA, 19 bp, Homo Sapiens
tagcactctggactttgaa

SEQ ID NO: 40435 - DNA, 20 bp, Homo Sapiens
tagcactctggactttgaat

SEQ ID NO: 40436 - DNA, 21 bp, Homo Sapiens
tagcactctggactttgaatc

SEQ ID NO: 40437 - DNA, 22 bp, Homo Sapiens
tagcactctggactttgaatcc

SEQ ID NO: 40438 - DNA, 23 bp, Homo Sapiens
tagcactctggactttgaatcca

SEQ ID NO: 40439 - DNA, 33 bp, Homo Sapiens; identical to SEQ ID NO: 23807

SEQ ID NO: 40440 - DNA, 34 bp, Homo Sapiens; identical to SEQ ID NO: 23808

SEQ ID NO: 40441 - DNA, 16 bp, Homo Sapiens
tagcggttaggattcc

SEQ ID NO: 40442 - DNA, 20 bp, Homo Sapiens
tagcggttaggattcctggt

SEQ ID NO: 40443 - DNA, 21 bp, Homo Sapiens
tagcggttaggattcctggtt

SEQ ID NO: 40444 - DNA, 22 bp, Homo Sapiens
tagcggttaggattcctggttt

SEQ ID NO: 40445 - DNA, 23 bp, Homo Sapiens
tagcggttaggattcctggtttt

SEQ ID NO: 40446 - DNA, 21 bp, Homo Sapiens
tagcggttatcacattcgcct

SEQ ID NO: 40447 - DNA, 22 bp, Homo Sapiens
tagcgtggccgagcggtctaag

SEQ ID NO: 40448 - DNA, 26 bp, Homo Sapiens
tagctcaggggttagagcactggtct

SEQ ID NO: 40449 - DNA, 16 bp, Homo Sapiens
tagctcagtcggtaga

SEQ ID NO: 40450 - DNA, 17 bp, Homo Sapiens
tagctcagtcggtagag

SEQ ID NO: 40451 - DNA, 19 bp, Homo Sapiens
tagctcagtcggtagagca

SEQ ID NO: 40452 - DNA, 25 bp, Homo Sapiens
tagctcagtcggtagagcatcagac

SEQ ID NO: 40453 - DNA, 26 bp, Homo Sapiens
tagctcagtcggtagagcatcagact

SEQ ID NO: 40454 - DNA, 28 bp, Homo Sapiens
tagctcagtcggtagagcatcagacttt

SEQ ID NO: 40455 - DNA, 46 bp, Homo Sapiens
tagctcagtcggtagagcatcagacttttaatctgagggtccaggg

SEQ ID NO: 40456 - DNA, 25 bp, Homo Sapiens
tagctcagtcggtagagcatgagac

SEQ ID NO: 40457 - DNA, 26 bp, Homo Sapiens
tagctcagtcggtagagcatgagact

SEQ ID NO: 40458 - DNA, 27 bp, Homo Sapiens
tagctcagtcggtagagcatgagactc

SEQ ID NO: 40459 - DNA, 28 bp, Homo Sapiens
tagctcagtcggtagagcatgagactct

SEQ ID NO: 40460 - DNA, 34 bp, Homo Sapiens; identical to SEQ ID NO: 23910

SEQ ID NO: 40461 - DNA, 25 bp, Homo Sapiens
tagctcagtcggtagagcatgggac

SEQ ID NO: 40462 - DNA, 26 bp, Homo Sapiens
tagctcagtcggtagagcatgggact

SEQ ID NO: 40463 - DNA, 27 bp, Homo Sapiens
tagctcagtcggtagagcatgggactc

SEQ ID NO: 40464 - DNA, 28 bp, Homo Sapiens
tagctcagtcggtagagcatgggactct

SEQ ID NO: 40465 - DNA, 29 bp, Homo Sapiens
tagctcagtcggtagagcatgggactctt

SEQ ID NO: 40466 - DNA, 32 bp, Homo Sapiens; identical to SEQ ID NO: 23925

SEQ ID NO: 40467 - DNA, 33 bp, Homo Sapiens; identical to SEQ ID NO: 23926

SEQ ID NO: 40468 - DNA, 34 bp, Homo Sapiens; identical to SEQ ID NO: 23927

SEQ ID NO: 40469 - DNA, 42 bp, Homo Sapiens; identical to SEQ ID NO: 23928

SEQ ID NO: 40470 - DNA, 45 bp, Homo Sapiens; identical to SEQ ID NO: 23929

SEQ ID NO: 40471 - DNA, 25 bp, Homo Sapiens
tagctcagtggtagagcatttgact

SEQ ID NO: 40472 - DNA, 46 bp, Homo Sapiens; identical to SEQ ID NO: 23965

SEQ ID NO: 40473 - DNA, 31 bp, Homo Sapiens; identical to SEQ ID NO: 24008

SEQ ID NO: 40474 - DNA, 32 bp, Homo Sapiens; identical to SEQ ID NO: 24009

SEQ ID NO: 40475 - DNA, 33 bp, Homo Sapiens; identical to SEQ ID NO: 24010

SEQ ID NO: 40476 - DNA, 34 bp, Homo Sapiens; identical to SEQ ID NO: 24011

SEQ ID NO: 40477 - DNA, 35 bp, Homo Sapiens; identical to SEQ ID NO: 24012

SEQ ID NO: 40478 - DNA, 16 bp, Homo Sapiens
taggagcttaaacccc

SEQ ID NO: 40479 - DNA, 28 bp, Homo Sapiens
taggagcttaaacccccttatttctacc

SEQ ID NO: 40480 - DNA, 29 bp, Homo Sapiens
taggagcttaaacccccttatttctacca

SEQ ID NO: 40481 - DNA, 16 bp, Homo Sapiens
taggatggggtgtgat

SEQ ID NO: 40482 - DNA, 17 bp, Homo Sapiens
taggatggggtgtgata

SEQ ID NO: 40483 - DNA, 18 bp, Homo Sapiens
taggatggggtgtgatag

SEQ ID NO: 40484 - DNA, 19 bp, Homo Sapiens
taggatggggtgtgatagg

SEQ ID NO: 40485 - DNA, 20 bp, Homo Sapiens
taggatggggtgtgataggt

SEQ ID NO: 40486 - DNA, 21 bp, Homo Sapiens
taggatggggtgtgataggtg

SEQ ID NO: 40487 - DNA, 22 bp, Homo Sapiens
taggatggggtgtgataggtgg

SEQ ID NO: 40488 - DNA, 23 bp, Homo Sapiens
taggatggggtgtgataggtggc

SEQ ID NO: 40489 - DNA, 24 bp, Homo Sapiens
taggatggggtgtgataggtggca

SEQ ID NO: 40490 - DNA, 25 bp, Homo Sapiens
taggatggggtgtgataggtggcac

SEQ ID NO: 40491 - DNA, 26 bp, Homo Sapiens
taggatggggtgtgataggtggcacg

SEQ ID NO: 40492 - DNA, 27 bp, Homo Sapiens
taggatggggtgtgataggtggcacgg

SEQ ID NO: 40493 - DNA, 28 bp, Homo Sapiens
taggatggggtgtgataggtggcacgga

SEQ ID NO: 40494 - DNA, 29 bp, Homo Sapiens
taggatggggtgtgataggtggcacggag

SEQ ID NO: 40495 - DNA, 30 bp, Homo Sapiens; identical to SEQ ID NO: 24039

SEQ ID NO: 40496 - DNA, 31 bp, Homo Sapiens; identical to SEQ ID NO: 24040

SEQ ID NO: 40497 - DNA, 32 bp, Homo Sapiens; identical to SEQ ID NO: 24041

SEQ ID NO: 40498 - DNA, 33 bp, Homo Sapiens; identical to SEQ ID NO: 24042

SEQ ID NO: 40499 - DNA, 34 bp, Homo Sapiens; identical to SEQ ID NO: 24043

SEQ ID NO: 40500 - DNA, 35 bp, Homo Sapiens; identical to SEQ ID NO: 24044

SEQ ID NO: 40501 - DNA, 36 bp, Homo Sapiens; identical to SEQ ID NO: 24045

SEQ ID NO: 40502 - DNA, 37 bp, Homo Sapiens; identical to SEQ ID NO: 24046

SEQ ID NO: 40503 - DNA, 38 bp, Homo Sapiens; identical to SEQ ID NO: 24047

SEQ ID NO: 40504 - DNA, 40 bp, Homo Sapiens; identical to SEQ ID NO: 24049

SEQ ID NO: 40505 - DNA, 41 bp, Homo Sapiens; identical to SEQ ID NO: 24050

SEQ ID NO: 40506 - DNA, 42 bp, Homo Sapiens; identical to SEQ ID NO: 24051

SEQ ID NO: 40507 - DNA, 43 bp, Homo Sapiens; identical to SEQ ID NO: 24052

SEQ ID NO: 40508 - DNA, 44 bp, Homo Sapiens; identical to SEQ ID NO: 24053

SEQ ID NO: 40509 - DNA, 24 bp, Homo Sapiens
taggattcctggttttcacccagg

SEQ ID NO: 40510 - DNA, 29 bp, Homo Sapiens
taggattcctggttttcacccaggcggcc

SEQ ID NO: 40511 - DNA, 47 bp, Homo Sapiens; identical to SEQ ID NO: 24063

SEQ ID NO: 40512 - DNA, 26 bp, Homo Sapiens
taggattcctggttttcacccaggtg

SEQ ID NO: 40513 - DNA, 47 bp, Homo Sapiens
taggattcctggttttcacccaggtggcccgggttcgactcccggta

SEQ ID NO: 40514 - DNA, 16 bp, Homo Sapiens
taggattcggcgctct

SEQ ID NO: 40515 - DNA, 17 bp, Homo Sapiens
taggattcggcgctctc

SEQ ID NO: 40516 - DNA, 19 bp, Homo Sapiens
taggattcggcgctctcac

SEQ ID NO: 40517 - DNA, 20 bp, Homo Sapiens
taggattcggcgctctcacc

SEQ ID NO: 40518 - DNA, 21 bp, Homo Sapiens
taggattcggcgctctcaccg

SEQ ID NO: 40519 - DNA, 22 bp, Homo Sapiens
taggattcggcgctctcaccgc

SEQ ID NO: 40520 - DNA, 23 bp, Homo Sapiens
taggattcggcgctctcaccgcc

SEQ ID NO: 40521 - DNA, 29 bp, Homo Sapiens
taggattcggcgctctcaccgccgcggcc

SEQ ID NO: 40522 - DNA, 30 bp, Homo Sapiens; identical to SEQ ID NO: 24078

SEQ ID NO: 40523 - DNA, 33 bp, Homo Sapiens; identical to SEQ ID NO: 24081

SEQ ID NO: 40524 - DNA, 36 bp, Homo Sapiens; identical to SEQ ID NO: 24084

SEQ ID NO: 40525 - DNA, 20 bp, Homo Sapiens
taggcctctttttaccacca

SEQ ID NO: 40526 - DNA, 16 bp, Homo Sapiens
taggggtatgattctc

SEQ ID NO: 40527 - DNA, 19 bp, Homo Sapiens
taggggtatgattctcgct

SEQ ID NO: 40528 - DNA, 20 bp, Homo Sapiens
taggggtatgattctcgctt

SEQ ID NO: 40529 - DNA, 19 bp, Homo Sapiens
taggggtatgattctcggt

SEQ ID NO: 40530 - DNA, 20 bp, Homo Sapiens
taggggtatgattctcggtt

SEQ ID NO: 40531 - DNA, 32 bp, Homo Sapiens; identical to SEQ ID NO: 24135

SEQ ID NO: 40532 - DNA, 33 bp, Homo Sapiens; identical to SEQ ID NO: 24136

SEQ ID NO: 40533 - DNA, 33 bp, Homo Sapiens; identical to SEQ ID NO: 24138

SEQ ID NO: 40534 - DNA, 32 bp, Homo Sapiens; identical to SEQ ID NO: 24143

SEQ ID NO: 40535 - DNA, 33 bp, Homo Sapiens; identical to SEQ ID NO: 24144

SEQ ID NO: 40536 - DNA, 16 bp, Homo Sapiens
taggtggcacggagaa

SEQ ID NO: 40537 - DNA, 20 bp, Homo Sapiens
taggtggcacggagaatttt

SEQ ID NO: 40538 - DNA, 24 bp, Homo Sapiens
taggttcgactcctggctggctcg

SEQ ID NO: 40539 - DNA, 26 bp, Homo Sapiens
taggttcgactcctggctggctcgcc

SEQ ID NO: 40540 - DNA, 27 bp, Homo Sapiens
taggttcgactcctggctggctcgcca

SEQ ID NO: 40541 - DNA, 20 bp, Homo Sapiens
tagtactctgcgttgtggcc

SEQ ID NO: 40542 - DNA, 21 bp, Homo Sapiens
tagtactctgcgttgtggccg

SEQ ID NO: 40543 - DNA, 34 bp, Homo Sapiens; identical to SEQ ID NO: 24182

SEQ ID NO: 40544 - DNA, 16 bp, Homo Sapiens
tagtccgtgcgagaat

SEQ ID NO: 40545 - DNA, 17 bp, Homo Sapiens
tagtccgtgcgagaata

SEQ ID NO: 40546 - DNA, 19 bp, Homo Sapiens
tagtccgtgcgagaatacc

SEQ ID NO: 40547 - DNA, 20 bp, Homo Sapiens
tagtccgtgcgagaatacca

SEQ ID NO: 40548 - DNA, 16 bp, Homo Sapiens
tagtcgtggccgagtg

SEQ ID NO: 40549 - DNA, 17 bp, Homo Sapiens
tagtcgtggccgagtgg

SEQ ID NO: 40550 - DNA, 21 bp, Homo Sapiens
tagtcgtggccgagtggttaa

SEQ ID NO: 40551 - DNA, 22 bp, Homo Sapiens
tagtcgtggccgagtggttaag

SEQ ID NO: 40552 - DNA, 23 bp, Homo Sapiens
tagtcgtggccgagtggttaagg

SEQ ID NO: 40553 - DNA, 18 bp, Homo Sapiens
tagtggctaggattcggc

SEQ ID NO: 40554 - DNA, 27 bp, Homo Sapiens
tagtggctaggattcggcgctttcacc

SEQ ID NO: 40555 - DNA, 20 bp, Homo Sapiens
tagtggtagaattctcgcct

SEQ ID NO: 40556 - DNA, 20 bp, Homo Sapiens
tagtggtatcatgcaagatt

SEQ ID NO: 40557 - DNA, 16 bp, Homo Sapiens
tagtggtatgattctc

SEQ ID NO: 40558 - DNA, 19 bp, Homo Sapiens
tagtggtatgattctcgct

SEQ ID NO: 40559 - DNA, 20 bp, Homo Sapiens
tagtggtatgattctcgctt

SEQ ID NO: 40560 - DNA, 19 bp, Homo Sapiens
tagtggtgagtatccccgc

SEQ ID NO: 40561 - DNA, 16 bp, Homo Sapiens
tagtggttaggattcg

SEQ ID NO: 40562 - DNA, 18 bp, Homo Sapiens
tagtggttaggattcggc

SEQ ID NO: 40563 - DNA, 19 bp, Homo Sapiens
tagtggttaggattcggcg

SEQ ID NO: 40564 - DNA, 20 bp, Homo Sapiens
tagtggttaggattcggcgc

SEQ ID NO: 40565 - DNA, 21 bp, Homo Sapiens
tagtggttaggattcggcgct

SEQ ID NO: 40566 - DNA, 22 bp, Homo Sapiens
tagtggttaggattcggcgctc

SEQ ID NO: 40567 - DNA, 25 bp, Homo Sapiens
tagtggttaggattcggcgctctca

SEQ ID NO: 40568 - DNA, 27 bp, Homo Sapiens
tagtggttaggattcggcgctctcacc

SEQ ID NO: 40569 - DNA, 30 bp, Homo Sapiens; identical to SEQ ID NO: 24258

SEQ ID NO: 40570 - DNA, 32 bp, Homo Sapiens; identical to SEQ ID NO: 24259

SEQ ID NO: 40571 - DNA, 37 bp, Homo Sapiens; identical to SEQ ID NO: 24261

SEQ ID NO: 40572 - DNA, 38 bp, Homo Sapiens; identical to SEQ ID NO: 24262

SEQ ID NO: 40573 - DNA, 42 bp, Homo Sapiens; identical to SEQ ID NO: 24266

SEQ ID NO: 40574 - DNA, 16 bp, Homo Sapiens
tagtggttagtactct

SEQ ID NO: 40575 - DNA, 17 bp, Homo Sapiens
tagtggttagtactctg

SEQ ID NO: 40576 - DNA, 18 bp, Homo Sapiens
tagtggttagtactctgc

SEQ ID NO: 40577 - DNA, 19 bp, Homo Sapiens
tagtggttagtactctgcg

SEQ ID NO: 40578 - DNA, 20 bp, Homo Sapiens
tagtggttagtactctgcgt

SEQ ID NO: 40579 - DNA, 21 bp, Homo Sapiens
tagtggttagtactctgcgtt

SEQ ID NO: 40580 - DNA, 22 bp, Homo Sapiens
tagtggttagtactctgcgttg

SEQ ID NO: 40581 - DNA, 23 bp, Homo Sapiens
tagtggttagtactctgcgttgt

SEQ ID NO: 40582 - DNA, 24 bp, Homo Sapiens
tagtggttagtactctgcgttgtg

SEQ ID NO: 40583 - DNA, 27 bp, Homo Sapiens
tagtggttagtactctgcgttgtggcc

SEQ ID NO: 40584 - DNA, 32 bp, Homo Sapiens; identical to SEQ ID NO: 24283

SEQ ID NO: 40585 - DNA, 33 bp, Homo Sapiens; identical to SEQ ID NO: 24284

SEQ ID NO: 40586 - DNA, 34 bp, Homo Sapiens; identical to SEQ ID NO: 24285

SEQ ID NO: 40587 - DNA, 36 bp, Homo Sapiens; identical to SEQ ID NO: 24286

SEQ ID NO: 40588 - DNA, 37 bp, Homo Sapiens; identical to SEQ ID NO: 24287

SEQ ID NO: 40589 - DNA, 21 bp, Homo Sapiens
tagtggttatcacatctgctt

SEQ ID NO: 40590 - DNA, 20 bp, Homo Sapiens
tagtggttatcacgtctgct

SEQ ID NO: 40591 - DNA, 21 bp, Homo Sapiens
tagtggttatcacgtctgctt

SEQ ID NO: 40592 - DNA, 22 bp, Homo Sapiens
tagtggttatcacgtctgcttt

SEQ ID NO: 40593 - DNA, 18 bp, Homo Sapiens
tagtggttatcacgttcg

SEQ ID NO: 40594 - DNA, 20 bp, Homo Sapiens
tagtggttatcacgttcgcc

SEQ ID NO: 40595 - DNA, 21 bp, Homo Sapiens
tagtggttatcacgttcgcct

SEQ ID NO: 40596 - DNA, 26 bp, Homo Sapiens
tagtgtagcggttatcacgtctgctt

SEQ ID NO: 40597 - DNA, 27 bp, Homo Sapiens
tagtgtagcggttatcacgtctgcttt

SEQ ID NO: 40598 - DNA, 26 bp, Homo Sapiens
tagtgtagtggtcatcacgttcgcct

SEQ ID NO: 40599 - DNA, 16 bp, Homo Sapiens
tagtgtagtggttatc

SEQ ID NO: 40600 - DNA, 17 bp, Homo Sapiens
tagtgtagtggttatca

SEQ ID NO: 40601 - DNA, 26 bp, Homo Sapiens
tagtgtagtggttatcacatctgctt

SEQ ID NO: 40602 - DNA, 24 bp, Homo Sapiens
tagtgtagtggttatcacgtctgc

SEQ ID NO: 40603 - DNA, 25 bp, Homo Sapiens
tagtgtagtggttatcacgtctgct

SEQ ID NO: 40604 - DNA, 26 bp, Homo Sapiens
tagtgtagtggttatcacgtctgctt

SEQ ID NO: 40605 - DNA, 27 bp, Homo Sapiens
tagtgtagtggttatcacgtctgcttt

SEQ ID NO: 40606 - DNA, 28 bp, Homo Sapiens
tagtgtagtggttatcacgtctgcttta

SEQ ID NO: 40607 - DNA, 24 bp, Homo Sapiens
tagtgtagtggttatcacgttcgc

SEQ ID NO: 40608 - DNA, 25 bp, Homo Sapiens
tagtgtagtggttatcacgttcgcc

SEQ ID NO: 40609 - DNA, 26 bp, Homo Sapiens
tagtgtagtggttatcacgttcgcct

SEQ ID NO: 40610 - DNA, 29 bp, Homo Sapiens
tagtgtagtggttatcacgttcgcctcac

SEQ ID NO: 40611 - DNA, 30 bp, Homo Sapiens; identical to SEQ ID NO: 24367

SEQ ID NO: 40612 - DNA, 23 bp, Homo Sapiens
tataatgccgaggttgtgagttc

SEQ ID NO: 40613 - DNA, 42 bp, Homo Sapiens; identical to SEQ ID NO: 24383

SEQ ID NO: 40614 - DNA, 42 bp, Homo Sapiens; identical to SEQ ID NO: 24384

SEQ ID NO: 40615 - DNA, 20 bp, Homo Sapiens
tatacccttcccgtactacc

SEQ ID NO: 40616 - DNA, 21 bp, Homo Sapiens
tatacccttcccgtactacca

SEQ ID NO: 40617 - DNA, 27 bp, Homo Sapiens
tatagctcagtggtagagcatttgact

SEQ ID NO: 40618 - DNA, 17 bp, Homo Sapiens
tatagtggttagtactc

SEQ ID NO: 40619 - DNA, 20 bp, Homo Sapiens
tatagtggttagtactctgc

SEQ ID NO: 40620 - DNA, 21 bp, Homo Sapiens
tatagtggttagtactctgcg

SEQ ID NO: 40621 - DNA, 22 bp, Homo Sapiens
tatagtggttagtactctgcgt

SEQ ID NO: 40622 - DNA, 23 bp, Homo Sapiens
tatagtggttagtactctgcgtt

SEQ ID NO: 40623 - DNA, 24 bp, Homo Sapiens
tatagtggttagtactctgcgttg

SEQ ID NO: 40624 - DNA, 25 bp, Homo Sapiens
tatagtggttagtactctgcgttgt

SEQ ID NO: 40625 - DNA, 26 bp, Homo Sapiens
tatagtggttagtactctgcgttgtg

SEQ ID NO: 40626 - DNA, 29 bp, Homo Sapiens
tatagtggttagtactctgcgttgtggcc

SEQ ID NO: 40627 - DNA, 30 bp, Homo Sapiens; identical to SEQ ID NO: 24434

SEQ ID NO: 40628 - DNA, 38 bp, Homo Sapiens; identical to SEQ ID NO: 24435

SEQ ID NO: 40629 - DNA, 39 bp, Homo Sapiens; identical to SEQ ID NO: 24436

SEQ ID NO: 40630 - DNA, 20 bp, Homo Sapiens
tatcacgtctgctttacacg

SEQ ID NO: 40631 - DNA, 24 bp, Homo Sapiens
tatcattggtcgtggttgtagtcc

SEQ ID NO: 40632 - DNA, 27 bp, Homo Sapiens
tatcattggtcgtggttgtagtccgtg

SEQ ID NO: 40633 - DNA, 29 bp, Homo Sapiens
tatcattggtcgtggttgtagtccgtgcg

SEQ ID NO: 40634 - DNA, 30 bp, Homo Sapiens; identical to SEQ ID NO: 24471

SEQ ID NO: 40635 - DNA, 31 bp, Homo Sapiens; identical to SEQ ID NO: 24472

SEQ ID NO: 40636 - DNA, 32 bp, Homo Sapiens; identical to SEQ ID NO: 24473

SEQ ID NO: 40637 - DNA, 33 bp, Homo Sapiens; identical to SEQ ID NO: 24474

SEQ ID NO: 40638 - DNA, 34 bp, Homo Sapiens; identical to SEQ ID NO: 24475

SEQ ID NO: 40639 - DNA, 35 bp, Homo Sapiens; identical to SEQ ID NO: 24476

SEQ ID NO: 40640 - DNA, 36 bp, Homo Sapiens; identical to SEQ ID NO: 24477

SEQ ID NO: 40641 - DNA, 37 bp, Homo Sapiens; identical to SEQ ID NO: 24478

SEQ ID NO: 40642 - DNA, 38 bp, Homo Sapiens; identical to SEQ ID NO: 24479

SEQ ID NO: 40643 - DNA, 30 bp, Homo Sapiens; identical to SEQ ID NO: 24516

SEQ ID NO: 40644 - DNA, 31 bp, Homo Sapiens; identical to SEQ ID NO: 24517

SEQ ID NO: 40645 - DNA, 32 bp, Homo Sapiens; identical to SEQ ID NO: 24518

SEQ ID NO: 40646 - DNA, 34 bp, Homo Sapiens; identical to SEQ ID NO: 24530

SEQ ID NO: 40647 - DNA, 35 bp, Homo Sapiens; identical to SEQ ID NO: 24531

SEQ ID NO: 40648 - DNA, 36 bp, Homo Sapiens; identical to SEQ ID NO: 24532

SEQ ID NO: 40649 - DNA, 33 bp, Homo Sapiens
tatgaggccccgggttcgatccccggcatctcc

SEQ ID NO: 40650 - DNA, 34 bp, Homo Sapiens
tatgaggccccgggttcgatccccggcatctcca

SEQ ID NO: 40651 - DNA, 35 bp, Homo Sapiens; identical to SEQ ID NO: 24534

SEQ ID NO: 40652 - DNA, 36 bp, Homo Sapiens; identical to SEQ ID NO: 24535

SEQ ID NO: 40653 - DNA, 33 bp, Homo Sapiens
tatgaggtcccgggttcgatccccggcatctcc

SEQ ID NO: 40654 - DNA, 34 bp, Homo Sapiens
tatgaggtcccgggttcgatccccggcatctcca

SEQ ID NO: 40655 - DNA, 35 bp, Homo Sapiens; identical to SEQ ID NO: 24537

SEQ ID NO: 40656 - DNA, 36 bp, Homo Sapiens; identical to SEQ ID NO: 24538

SEQ ID NO: 40657 - DNA, 21 bp, Homo Sapiens
tatgattctcggtttgggtcc

SEQ ID NO: 40658 - DNA, 25 bp, Homo Sapiens
tatgattctcggtttgggtccgaga

SEQ ID NO: 40659 - DNA, 24 bp, Homo Sapiens
tatggtctagcggttaggattcct

SEQ ID NO: 40660 - DNA, 27 bp, Homo Sapiens
tatggtctagcggttaggattcctggt

SEQ ID NO: 40661 - DNA, 28 bp, Homo Sapiens
tatggtctagcggttaggattcctggtt

SEQ ID NO: 40662 - DNA, 29 bp, Homo Sapiens
tatggtctagcggttaggattcctggttt

SEQ ID NO: 40663 - DNA, 30 bp, Homo Sapiens; identical to SEQ ID NO: 24572

SEQ ID NO: 40664 - DNA, 32 bp, Homo Sapiens
tatggtctagcggttaggattcctggttttca

SEQ ID NO: 40665 - DNA, 16 bp, Homo Sapiens
tatgtccgcgtgggtt

SEQ ID NO: 40666 - DNA, 44 bp, Homo Sapiens; identical to SEQ ID NO: 24603

SEQ ID NO: 40667 - DNA, 45 bp, Homo Sapiens; identical to SEQ ID NO: 24604

SEQ ID NO: 40668 - DNA, 46 bp, Homo Sapiens; identical to SEQ ID NO: 24605

SEQ ID NO: 40669 - DNA, 47 bp, Homo Sapiens; identical to SEQ ID NO: 24606

SEQ ID NO: 40670 - DNA, 16 bp, Homo Sapiens
tcaaacctgccggggc

SEQ ID NO: 40671 - DNA, 17 bp, Homo Sapiens
tcaaacctgccggggct

SEQ ID NO: 40672 - DNA, 18 bp, Homo Sapiens
tcaaacctgccggggctt

SEQ ID NO: 40673 - DNA, 20 bp, Homo Sapiens
tcaaacctgccggggcttcc

SEQ ID NO: 40674 - DNA, 21 bp, Homo Sapiens
tcaaacctgccggggcttcca

SEQ ID NO: 40675 - DNA, 34 bp, Homo Sapiens; identical to SEQ ID NO: 24625

SEQ ID NO: 40676 - DNA, 35 bp, Homo Sapiens; identical to SEQ ID NO: 24626

SEQ ID NO: 40677 - DNA, 36 bp, Homo Sapiens; identical to SEQ ID NO: 24627

SEQ ID NO: 40678 - DNA, 37 bp, Homo Sapiens; identical to SEQ ID NO: 24628

SEQ ID NO: 40679 - DNA, 32 bp, Homo Sapiens; identical to SEQ ID NO: 24640

SEQ ID NO: 40680 - DNA, 33 bp, Homo Sapiens; identical to SEQ ID NO: 24641

SEQ ID NO: 40681 - DNA, 34 bp, Homo Sapiens; identical to SEQ ID NO: 24642

SEQ ID NO: 40682 - DNA, 35 bp, Homo Sapiens; identical to SEQ ID NO: 24643

SEQ ID NO: 40683 - DNA, 36 bp, Homo Sapiens; identical to SEQ ID NO: 24644

SEQ ID NO: 40684 - DNA, 37 bp, Homo Sapiens; identical to SEQ ID NO: 24645

SEQ ID NO: 40685 - DNA, 33 bp, Homo Sapiens
tcaaaggttgtgggttcgaatcccaccagagtc

SEQ ID NO: 40686 - DNA, 34 bp, Homo Sapiens
tcaaaggttgtgggttcgaatcccaccagagtcg

SEQ ID NO: 40687 - DNA, 35 bp, Homo Sapiens; identical to SEQ ID NO: 24646

SEQ ID NO: 40688 - DNA, 36 bp, Homo Sapiens; identical to SEQ ID NO: 24647

SEQ ID NO: 40689 - DNA, 37 bp, Homo Sapiens; identical to SEQ ID NO: 24648

SEQ ID NO: 40690 - DNA, 33 bp, Homo Sapiens
tcaaaggttgtgggttcgagtcccaccagagtc

SEQ ID NO: 40691 - DNA, 34 bp, Homo Sapiens
tcaaaggttgtgggttcgagtcccaccagagtcg

SEQ ID NO: 40692 - DNA, 35 bp, Homo Sapiens; identical to SEQ ID NO: 24649

SEQ ID NO: 40693 - DNA, 36 bp, Homo Sapiens; identical to SEQ ID NO: 24650

SEQ ID NO: 40694 - DNA, 37 bp, Homo Sapiens; identical to SEQ ID NO: 24651

SEQ ID NO: 40695 - DNA, 20 bp, Homo Sapiens
tcaaagttaaattataggct

SEQ ID NO: 40696 - DNA, 19 bp, Homo Sapiens
tcaaatcacgtcggggtca

SEQ ID NO: 40697 - DNA, 20 bp, Homo Sapiens
tcaaatcacgtcggggtcac

SEQ ID NO: 40698 - DNA, 21 bp, Homo Sapiens
tcaaatcacgtcggggtcacc

SEQ ID NO: 40699 - DNA, 22 bp, Homo Sapiens
tcaaatcacgtcggggtcacca

SEQ ID NO: 40700 - DNA, 17 bp, Homo Sapiens
tcaaatcccggacgagc

SEQ ID NO: 40701 - DNA, 18 bp, Homo Sapiens
tcaaatcccggacgagcc

SEQ ID NO: 40702 - DNA, 19 bp, Homo Sapiens
tcaaatcccggacgagccc

SEQ ID NO: 40703 - DNA, 20 bp, Homo Sapiens
tcaaatcccggacgagcccc

SEQ ID NO: 40704 - DNA, 21 bp, Homo Sapiens
tcaaatcccggacgagccccc

SEQ ID NO: 40705 - DNA, 22 bp, Homo Sapiens
tcaaatcccggacgagccccca

SEQ ID NO: 40706 - DNA, 20 bp, Homo Sapiens
tcaaatccgggtgccccctc

SEQ ID NO: 40707 - DNA, 21 bp, Homo Sapiens
tcaaatccgggtgccccctcc

SEQ ID NO: 40708 - DNA, 18 bp, Homo Sapiens
tcaaatctcgctggggcc

SEQ ID NO: 40709 - DNA, 19 bp, Homo Sapiens
tcaaatctcgctggggcct

SEQ ID NO: 40710 - DNA, 20 bp, Homo Sapiens
tcaaatctcgctggggcctc

SEQ ID NO: 40711 - DNA, 21 bp, Homo Sapiens
tcaaatctcgctggggcctcc

SEQ ID NO: 40712 - DNA, 18 bp, Homo Sapiens
tcaaatctcggtggaacc

SEQ ID NO: 40713 - DNA, 19 bp, Homo Sapiens
tcaaatctcggtggaacct

SEQ ID NO: 40714 - DNA, 20 bp, Homo Sapiens
tcaaatctcggtggaacctc

SEQ ID NO: 40715 - DNA, 21 bp, Homo Sapiens
tcaaatctcggtggaacctcc

SEQ ID NO: 40716 - DNA, 22 bp, Homo Sapiens
tcaaatctcggtggaacctcca

SEQ ID NO: 40717 - DNA, 19 bp, Homo Sapiens
tcaaatctcggtgggacct

SEQ ID NO: 40718 - DNA, 20 bp, Homo Sapiens
tcaaatctcggtgggacctc

SEQ ID NO: 40719 - DNA, 21 bp, Homo Sapiens
tcaaatctcggtgggacctcc

SEQ ID NO: 40720 - DNA, 20 bp, Homo Sapiens
tcaacttaacttgaccgctc

SEQ ID NO: 40721 - DNA, 22 bp, Homo Sapiens
tcaacttaacttgaccgctctg

SEQ ID NO: 40722 - DNA, 23 bp, Homo Sapiens
tcaacttaacttgaccgctctga

SEQ ID NO: 40723 - DNA, 24 bp, Homo Sapiens
tcaacttaacttgaccgctctgac

SEQ ID NO: 40724 - DNA, 25 bp, Homo Sapiens
tcaacttaacttgaccgctctgacc

SEQ ID NO: 40725 - DNA, 26 bp, Homo Sapiens
tcaacttaacttgaccgctctgacca

SEQ ID NO: 40726 - DNA, 32 bp, Homo Sapiens
tcaagaggtccccggttcaaatccgggtgccc

SEQ ID NO: 40727 - DNA, 33 bp, Homo Sapiens
tcaagaggtccccggttcaaatccgggtgcccc

SEQ ID NO: 40728 - DNA, 34 bp, Homo Sapiens
tcaagaggtccccggttcaaatccgggtgccccc

SEQ ID NO: 40729 - DNA, 35 bp, Homo Sapiens
tcaagaggtccccggttcaaatccgggtgcccccc

SEQ ID NO: 40730 - DNA, 35 bp, Homo Sapiens; identical to SEQ ID NO: 24715

SEQ ID NO: 40731 - DNA, 36 bp, Homo Sapiens; identical to SEQ ID NO: 24716

SEQ ID NO: 40732 - DNA, 37 bp, Homo Sapiens; identical to SEQ ID NO: 24717

SEQ ID NO: 40733 - DNA, 35 bp, Homo Sapiens; identical to SEQ ID NO: 24719

SEQ ID NO: 40734 - DNA, 36 bp, Homo Sapiens; identical to SEQ ID NO: 24720

SEQ ID NO: 40735 - DNA, 37 bp, Homo Sapiens; identical to SEQ ID NO: 24721

SEQ ID NO: 40736 - DNA, 34 bp, Homo Sapiens
tcaagaggtccctggttcaaatccgggtgccccc

SEQ ID NO: 40737 - DNA, 35 bp, Homo Sapiens; identical to SEQ ID NO: 24722

SEQ ID NO: 40738 - DNA, 36 bp, Homo Sapiens; identical to SEQ ID NO: 24723

SEQ ID NO: 40739 - DNA, 37 bp, Homo Sapiens; identical to SEQ ID NO: 24724

SEQ ID NO: 40740 - DNA, 19 bp, Homo Sapiens
tcaagtcacgtcggggtca

SEQ ID NO: 40741 - DNA, 20 bp, Homo Sapiens
tcaagtcacgtcggggtcac

SEQ ID NO: 40742 - DNA, 21 bp, Homo Sapiens
tcaagtcacgtcggggtcacc

SEQ ID NO: 40743 - DNA, 21 bp, Homo Sapiens
tcaagtccctgtccaggcgcc

SEQ ID NO: 40744 - DNA, 18 bp, Homo Sapiens
tcaagtccctgttcgggc

SEQ ID NO: 40745 - DNA, 19 bp, Homo Sapiens
tcaagtccctgttcgggcg

SEQ ID NO: 40746 - DNA, 20 bp, Homo Sapiens
tcaagtccctgttcgggcgc

SEQ ID NO: 40747 - DNA, 21 bp, Homo Sapiens
tcaagtccctgttcgggcgcc

SEQ ID NO: 40748 - DNA, 22 bp, Homo Sapiens
tcaagtccctgttcgggcgcca

SEQ ID NO: 40749 - DNA, 21 bp, Homo Sapiens
tcaatccccggcacctccacc

SEQ ID NO: 40750 - DNA, 22 bp, Homo Sapiens
tcaatccccggcacctccacca

SEQ ID NO: 40751 - DNA, 21 bp, Homo Sapiens
tcaatccccggcatctccacc

SEQ ID NO: 40752 - DNA, 20 bp, Homo Sapiens
tcaatcccgggtttcggcac

SEQ ID NO: 40753 - DNA, 20 bp, Homo Sapiens
tcaattccccgacggggagc

SEQ ID NO: 40754 - DNA, 21 bp, Homo Sapiens
tcaattccccgacggggagcc

SEQ ID NO: 40755 - DNA, 20 bp, Homo Sapiens
tcaattctcgctggggcctc

SEQ ID NO: 40756 - DNA, 17 bp, Homo Sapiens
tcacaagaactgctaac

SEQ ID NO: 40757 - DNA, 18 bp, Homo Sapiens
tcacaagaactgctaact

SEQ ID NO: 40758 - DNA, 27 bp, Homo Sapiens
tcacaagaactgctaactcatgccccc

SEQ ID NO: 40759 - DNA, 40 bp, Homo Sapiens; identical to SEQ ID NO: 24777

SEQ ID NO: 40760 - DNA, 45 bp, Homo Sapiens; identical to SEQ ID NO: 24782

SEQ ID NO: 40761 - DNA, 21 bp, Homo Sapiens
tcacatcaccccataaacacc

SEQ ID NO: 40762 - DNA, 16 bp, Homo Sapiens
tcacccaggcggcccg

SEQ ID NO: 40763 - DNA, 35 bp, Homo Sapiens; identical to SEQ ID NO: 24801

SEQ ID NO: 40764 - DNA, 36 bp, Homo Sapiens; identical to SEQ ID NO: 24802

SEQ ID NO: 40765 - DNA, 37 bp, Homo Sapiens; identical to SEQ ID NO: 24803

SEQ ID NO: 40766 - DNA, 38 bp, Homo Sapiens; identical to SEQ ID NO: 24804

SEQ ID NO: 40767 - DNA, 39 bp, Homo Sapiens; identical to SEQ ID NO: 24805

SEQ ID NO: 40768 - DNA, 40 bp, Homo Sapiens; identical to SEQ ID NO: 24806

SEQ ID NO: 40769 - DNA, 41 bp, Homo Sapiens; identical to SEQ ID NO: 24807

SEQ ID NO: 40770 - DNA, 38 bp, Homo Sapiens; identical to SEQ ID NO: 24808

SEQ ID NO: 40771 - DNA, 39 bp, Homo Sapiens; identical to SEQ ID NO: 24809

SEQ ID NO: 40772 - DNA, 40 bp, Homo Sapiens; identical to SEQ ID NO: 24810

SEQ ID NO: 40773 - DNA, 16 bp, Homo Sapiens
tcaccccataaacacc

SEQ ID NO: 40774 - DNA, 20 bp, Homo Sapiens
tcaccgccgcggcccgggtt

SEQ ID NO: 40775 - DNA, 36 bp, Homo Sapiens; identical to SEQ ID NO: 24829

SEQ ID NO: 40776 - DNA, 38 bp, Homo Sapiens; identical to SEQ ID NO: 24831

SEQ ID NO: 40777 - DNA, 39 bp, Homo Sapiens; identical to SEQ ID NO: 24832

SEQ ID NO: 40778 - DNA, 40 bp, Homo Sapiens; identical to SEQ ID NO: 24833

SEQ ID NO: 40779 - DNA, 41 bp, Homo Sapiens; identical to SEQ ID NO: 24834

SEQ ID NO: 40780 - DNA, 39 bp, Homo Sapiens; identical to SEQ ID NO: 24845

SEQ ID NO: 40781 - DNA, 40 bp, Homo Sapiens; identical to SEQ ID NO: 24846

SEQ ID NO: 40782 - DNA, 41 bp, Homo Sapiens; identical to SEQ ID NO: 24847

SEQ ID NO: 40783 - DNA, 36 bp, Homo Sapiens; identical to SEQ ID NO: 24856

SEQ ID NO: 40784 - DNA, 37 bp, Homo Sapiens; identical to SEQ ID NO: 24857

SEQ ID NO: 40785 - DNA, 38 bp, Homo Sapiens; identical to SEQ ID NO: 24858

SEQ ID NO: 40786 - DNA, 39 bp, Homo Sapiens; identical to SEQ ID NO: 24859

SEQ ID NO: 40787 - DNA, 40 bp, Homo Sapiens; identical to SEQ ID NO: 24860

SEQ ID NO: 40788 - DNA, 41 bp, Homo Sapiens; identical to SEQ ID NO: 24861

SEQ ID NO: 40789 - DNA, 27 bp, Homo Sapiens
tcacgggttcgaaccccgtccgtgcct

SEQ ID NO: 40790 - DNA, 16 bp, Homo Sapiens
tcacgtcggggtcacc

SEQ ID NO: 40791 - DNA, 17 bp, Homo Sapiens
tcacgtcggggtcacca

SEQ ID NO: 40792 - DNA, 18 bp, Homo Sapiens
tcacgtctgctttacacg

SEQ ID NO: 40793 - DNA, 18 bp, Homo Sapiens
tcagaagattccaggttc

SEQ ID NO: 40794 - DNA, 33 bp, Homo Sapiens; identical to SEQ ID NO: 24877

SEQ ID NO: 40795 - DNA, 34 bp, Homo Sapiens; identical to SEQ ID NO: 24878

SEQ ID NO: 40796 - DNA, 35 bp, Homo Sapiens; identical to SEQ ID NO: 24879

SEQ ID NO: 40797 - DNA, 36 bp, Homo Sapiens; identical to SEQ ID NO: 24880

SEQ ID NO: 40798 - DNA, 37 bp, Homo Sapiens; identical to SEQ ID NO: 24881

SEQ ID NO: 40799 - DNA, 38 bp, Homo Sapiens; identical to SEQ ID NO: 24882

SEQ ID NO: 40800 - DNA, 18 bp, Homo Sapiens
tcagaagattctaggttc

SEQ ID NO: 40801 - DNA, 22 bp, Homo Sapiens
tcagaagattctaggttcgact

SEQ ID NO: 40802 - DNA, 34 bp, Homo Sapiens; identical to SEQ ID NO: 24889

SEQ ID NO: 40803 - DNA, 35 bp, Homo Sapiens; identical to SEQ ID NO: 24890

SEQ ID NO: 40804 - DNA, 36 bp, Homo Sapiens; identical to SEQ ID NO: 24891

SEQ ID NO: 40805 - DNA, 37 bp, Homo Sapiens; identical to SEQ ID NO: 24892

SEQ ID NO: 40806 - DNA, 38 bp, Homo Sapiens; identical to SEQ ID NO: 24893

SEQ ID NO: 40807 - DNA, 18 bp, Homo Sapiens
tcagaagattgagggttc

SEQ ID NO: 40808 - DNA, 29 bp, Homo Sapiens
tcagaagattgagggttcgaatccctccg

SEQ ID NO: 40809 - DNA, 33 bp, Homo Sapiens; identical to SEQ ID NO: 24897

SEQ ID NO: 40810 - DNA, 34 bp, Homo Sapiens
tcagaagattgagggttcgaatccctccgtggtt

SEQ ID NO: 40811 - DNA, 35 bp, Homo Sapiens; identical to SEQ ID NO: 24898

SEQ ID NO: 40812 - DNA, 36 bp, Homo Sapiens; identical to SEQ ID NO: 24899

SEQ ID NO: 40813 - DNA, 37 bp, Homo Sapiens; identical to SEQ ID NO: 24900

SEQ ID NO: 40814 - DNA, 29 bp, Homo Sapiens
tcagaagattgagggttcgaatcccttcg

SEQ ID NO: 40815 - DNA, 32 bp, Homo Sapiens
tcagaagattgagggttcgaatcccttcgtgg

SEQ ID NO: 40816 - DNA, 33 bp, Homo Sapiens
tcagaagattgagggttcgaatcccttcgtggt

SEQ ID NO: 40817 - DNA, 35 bp, Homo Sapiens; identical to SEQ ID NO: 24901

SEQ ID NO: 40818 - DNA, 36 bp, Homo Sapiens; identical to SEQ ID NO: 24902

SEQ ID NO: 40819 - DNA, 37 bp, Homo Sapiens; identical to SEQ ID NO: 24903

SEQ ID NO: 40820 - DNA, 35 bp, Homo Sapiens; identical to SEQ ID NO: 24904

SEQ ID NO: 40821 - DNA, 36 bp, Homo Sapiens; identical to SEQ ID NO: 24905

SEQ ID NO: 40822 - DNA, 37 bp, Homo Sapiens; identical to SEQ ID NO: 24906

SEQ ID NO: 40823 - DNA, 38 bp, Homo Sapiens; identical to SEQ ID NO: 24907

SEQ ID NO: 40824 - DNA, 28 bp, Homo Sapiens
tcagaagattgagggttcgagtcccttc

SEQ ID NO: 40825 - DNA, 29 bp, Homo Sapiens
tcagaagattgagggttcgagtcccttcg

SEQ ID NO: 40826 - DNA, 33 bp, Homo Sapiens
tcagaagattgagggttcgagtcccttcgtggt

SEQ ID NO: 40827 - DNA, 34 bp, Homo Sapiens; identical to SEQ ID NO: 24909

SEQ ID NO: 40828 - DNA, 35 bp, Homo Sapiens; identical to SEQ ID NO: 24910

SEQ ID NO: 40829 - DNA, 36 bp, Homo Sapiens; identical to SEQ ID NO: 24911

SEQ ID NO: 40830 - DNA, 37 bp, Homo Sapiens; identical to SEQ ID NO: 24912

SEQ ID NO: 40831 - DNA, 38 bp, Homo Sapiens; identical to SEQ ID NO: 24913

SEQ ID NO: 40832 - DNA, 18 bp, Homo Sapiens
tcagaagattgcaggttc

SEQ ID NO: 40833 - DNA, 32 bp, Homo Sapiens
tcagaagattgcaggttcgagtcctgccgcgg

SEQ ID NO: 40834 - DNA, 33 bp, Homo Sapiens; identical to SEQ ID NO: 24919

SEQ ID NO: 40835 - DNA, 34 bp, Homo Sapiens; identical to SEQ ID NO: 24920

SEQ ID NO: 40836 - DNA, 35 bp, Homo Sapiens; identical to SEQ ID NO: 24921

SEQ ID NO: 40837 - DNA, 36 bp, Homo Sapiens; identical to SEQ ID NO: 24922

SEQ ID NO: 40838 - DNA, 37 bp, Homo Sapiens; identical to SEQ ID NO: 24923

SEQ ID NO: 40839 - DNA, 38 bp, Homo Sapiens; identical to SEQ ID NO: 24924

SEQ ID NO: 40840 - DNA, 18 bp, Homo Sapiens
tcagaaggctgcgtgttc

SEQ ID NO: 40841 - DNA, 32 bp, Homo Sapiens; identical to SEQ ID NO: 24937

SEQ ID NO: 40842 - DNA, 33 bp, Homo Sapiens; identical to SEQ ID NO: 24938

SEQ ID NO: 40843 - DNA, 34 bp, Homo Sapiens; identical to SEQ ID NO: 24939

SEQ ID NO: 40844 - DNA, 35 bp, Homo Sapiens; identical to SEQ ID NO: 24940

SEQ ID NO: 40845 - DNA, 36 bp, Homo Sapiens; identical to SEQ ID NO: 24941

SEQ ID NO: 40846 - DNA, 37 bp, Homo Sapiens; identical to SEQ ID NO: 24942

SEQ ID NO: 40847 - DNA, 38 bp, Homo Sapiens; identical to SEQ ID NO: 24943

SEQ ID NO: 40848 - DNA, 28 bp, Homo Sapiens
tcagaaggttgcgtgttcaaatcacgtc

SEQ ID NO: 40849 - DNA, 32 bp, Homo Sapiens
tcagaaggttgcgtgttcaaatcacgtcgggg

SEQ ID NO: 40850 - DNA, 33 bp, Homo Sapiens; identical to SEQ ID NO: 24951

SEQ ID NO: 40851 - DNA, 34 bp, Homo Sapiens; identical to SEQ ID NO: 24952

SEQ ID NO: 40852 - DNA, 35 bp, Homo Sapiens; identical to SEQ ID NO: 24953

SEQ ID NO: 40853 - DNA, 36 bp, Homo Sapiens; identical to SEQ ID NO: 24954

SEQ ID NO: 40854 - DNA, 37 bp, Homo Sapiens; identical to SEQ ID NO: 24955

SEQ ID NO: 40855 - DNA, 38 bp, Homo Sapiens; identical to SEQ ID NO: 24956

SEQ ID NO: 40856 - DNA, 33 bp, Homo Sapiens; identical to SEQ ID NO: 24961

SEQ ID NO: 40857 - DNA, 34 bp, Homo Sapiens; identical to SEQ ID NO: 24962

SEQ ID NO: 40858 - DNA, 35 bp, Homo Sapiens; identical to SEQ ID NO: 24963

SEQ ID NO: 40859 - DNA, 36 bp, Homo Sapiens; identical to SEQ ID NO: 24964

SEQ ID NO: 40860 - DNA, 37 bp, Homo Sapiens; identical to SEQ ID NO: 24965

SEQ ID NO: 40861 - DNA, 38 bp, Homo Sapiens; identical to SEQ ID NO: 24966

SEQ ID NO: 40862 - DNA, 27 bp, Homo Sapiens
tcagattgtgaatctgacaacagaggc

SEQ ID NO: 40863 - DNA, 28 bp, Homo Sapiens
tcagattgtgaatctgacaacagaggct

SEQ ID NO: 40864 - DNA, 36 bp, Homo Sapiens; identical to SEQ ID NO: 24984

SEQ ID NO: 40865 - DNA, 38 bp, Homo Sapiens; identical to SEQ ID NO: 24986

SEQ ID NO: 40866 - DNA, 24 bp, Homo Sapiens
tcagcctccggagctggggattgt

SEQ ID NO: 40867 - DNA, 21 bp, Homo Sapiens
tcagctaaataagctatcggg

SEQ ID NO: 40868 - DNA, 25 bp, Homo Sapiens
tcagctaaataagctatcgggccca

SEQ ID NO: 40869 - DNA, 16 bp, Homo Sapiens
tcaggatggccgagcg

SEQ ID NO: 40870 - DNA, 17 bp, Homo Sapiens
tcaggatggccgagcgg

SEQ ID NO: 40871 - DNA, 21 bp, Homo Sapiens
tcaggatggccgagcggtcta

SEQ ID NO: 40872 - DNA, 23 bp, Homo Sapiens
tcaggatggccgagcggtctaag

SEQ ID NO: 40873 - DNA, 33 bp, Homo Sapiens; identical to SEQ ID NO: 25029

SEQ ID NO: 40874 - DNA, 16 bp, Homo Sapiens
tcaggatggccgagtg

SEQ ID NO: 40875 - DNA, 21 bp, Homo Sapiens
tcaggggtagagcatttgact

SEQ ID NO: 40876 - DNA, 33 bp, Homo Sapiens; identical to SEQ ID NO: 25064

SEQ ID NO: 40877 - DNA, 34 bp, Homo Sapiens; identical to SEQ ID NO: 25065

SEQ ID NO: 40878 - DNA, 35 bp, Homo Sapiens; identical to SEQ ID NO: 25066

SEQ ID NO: 40879 - DNA, 27 bp, Homo Sapiens
tcagtaagttgcaatacttaatttctg

SEQ ID NO: 40880 - DNA, 30 bp, Homo Sapiens; identical to SEQ ID NO: 25075

SEQ ID NO: 40881 - DNA, 16 bp, Homo Sapiens
tcagtcggtagagcat

SEQ ID NO: 40882 - DNA, 17 bp, Homo Sapiens
tcagtcggtagagcatc

SEQ ID NO: 40883 - DNA, 18 bp, Homo Sapiens
tcagtcggtagagcatca

SEQ ID NO: 40884 - DNA, 20 bp, Homo Sapiens
tcagtcggtagagcatcaga

SEQ ID NO: 40885 - DNA, 21 bp, Homo Sapiens
tcagtcggtagagcatcagac

SEQ ID NO: 40886 - DNA, 22 bp, Homo Sapiens
tcagtcggtagagcatcagact

SEQ ID NO: 40887 - DNA, 23 bp, Homo Sapiens
tcagtcggtagagcatcagactt

SEQ ID NO: 40888 - DNA, 24 bp, Homo Sapiens
tcagtcggtagagcatcagacttt

SEQ ID NO: 40889 - DNA, 25 bp, Homo Sapiens
tcagtcggtagagcatcagactttt

SEQ ID NO: 40890 - DNA, 17 bp, Homo Sapiens
tcagtcggtagagcatg

SEQ ID NO: 40891 - DNA, 20 bp, Homo Sapiens
tcagtcggtagagcatgaga

SEQ ID NO: 40892 - DNA, 21 bp, Homo Sapiens
tcagtcggtagagcatgagac

SEQ ID NO: 40893 - DNA, 22 bp, Homo Sapiens
tcagtcggtagagcatgagact

SEQ ID NO: 40894 - DNA, 23 bp, Homo Sapiens
tcagtcggtagagcatgagactc

SEQ ID NO: 40895 - DNA, 24 bp, Homo Sapiens
tcagtcggtagagcatgagactct

SEQ ID NO: 40896 - DNA, 29 bp, Homo Sapiens
tcagtcggtagagcatgagactcttaatc

SEQ ID NO: 40897 - DNA, 30 bp, Homo Sapiens; identical to SEQ ID NO: 25109

SEQ ID NO: 40898 - DNA, 31 bp, Homo Sapiens; identical to SEQ ID NO: 25110

SEQ ID NO: 40899 - DNA, 44 bp, Homo Sapiens; identical to SEQ ID NO: 25115

SEQ ID NO: 40900 - DNA, 18 bp, Homo Sapiens
tcagtcggtagagcatgg

SEQ ID NO: 40901 - DNA, 19 bp, Homo Sapiens
tcagtcggtagagcatggg

SEQ ID NO: 40902 - DNA, 21 bp, Homo Sapiens
tcagtcggtagagcatgggac

SEQ ID NO: 40903 - DNA, 22 bp, Homo Sapiens
tcagtcggtagagcatgggact

SEQ ID NO: 40904 - DNA, 23 bp, Homo Sapiens
tcagtcggtagagcatgggactc

SEQ ID NO: 40905 - DNA, 24 bp, Homo Sapiens
tcagtcggtagagcatgggactct

SEQ ID NO: 40906 - DNA, 30 bp, Homo Sapiens; identical to SEQ ID NO: 25126

SEQ ID NO: 40907 - DNA, 31 bp, Homo Sapiens; identical to SEQ ID NO: 25127

SEQ ID NO: 40908 - DNA, 44 bp, Homo Sapiens; identical to SEQ ID NO: 25131

SEQ ID NO: 40909 - DNA, 16 bp, Homo Sapiens
tcagtctcataatctg

SEQ ID NO: 40910 - DNA, 17 bp, Homo Sapiens
tcagtggtagaattctc

SEQ ID NO: 40911 - DNA, 18 bp, Homo Sapiens
tcagtggtagaattctcg

SEQ ID NO: 40912 - DNA, 19 bp, Homo Sapiens
tcagtggtagaattctcgc

SEQ ID NO: 40913 - DNA, 20 bp, Homo Sapiens
tcagtggtagaattctcgcc

SEQ ID NO: 40914 - DNA, 21 bp, Homo Sapiens
tcagtggtagaattctcgcct

SEQ ID NO: 40915 - DNA, 25 bp, Homo Sapiens
tcagtggtagaattctcgcctccca

SEQ ID NO: 40916 - DNA, 22 bp, Homo Sapiens
tcagtggtagaattctcgcctg

SEQ ID NO: 40917 - DNA, 23 bp, Homo Sapiens
tcagtggtagaattctcgcctgc

SEQ ID NO: 40918 - DNA, 24 bp, Homo Sapiens
tcagtggtagaattctcgcctgcc

SEQ ID NO: 40919 - DNA, 25 bp, Homo Sapiens
tcagtggtagaattctcgcctgcca

SEQ ID NO: 40920 - DNA, 27 bp, Homo Sapiens
tcagtggtagaattctcgcctgccacg

SEQ ID NO: 40921 - DNA, 32 bp, Homo Sapiens; identical to SEQ ID NO: 25160

SEQ ID NO: 40922 - DNA, 37 bp, Homo Sapiens; identical to SEQ ID NO: 25162

SEQ ID NO: 40923 - DNA, 41 bp, Homo Sapiens; identical to SEQ ID NO: 25166

SEQ ID NO: 40924 - DNA, 21 bp, Homo Sapiens
tcagtggtagagcatttgact

SEQ ID NO: 40925 - DNA, 35 bp, Homo Sapiens; identical to SEQ ID NO: 25235

SEQ ID NO: 40926 - DNA, 36 bp, Homo Sapiens; identical to SEQ ID NO: 25236

SEQ ID NO: 40927 - DNA, 37 bp, Homo Sapiens; identical to SEQ ID NO: 25237

SEQ ID NO: 40928 - DNA, 38 bp, Homo Sapiens; identical to SEQ ID NO: 25238

SEQ ID NO: 40929 - DNA, 39 bp, Homo Sapiens; identical to SEQ ID NO: 25239

SEQ ID NO: 40930 - DNA, 40 bp, Homo Sapiens; identical to SEQ ID NO: 25240

SEQ ID NO: 40931 - DNA, 41 bp, Homo Sapiens; identical to SEQ ID NO: 25241

SEQ ID NO: 40932 - DNA, 27 bp, Homo Sapiens
tcatgcccccatgtctaacaacatggc

SEQ ID NO: 40933 - DNA, 28 bp, Homo Sapiens
tcatgcccccatgtctaacaacatggct

SEQ ID NO: 40934 - DNA, 29 bp, Homo Sapiens
tcatgcccccatgtctaacaacatggctt

SEQ ID NO: 40935 - DNA, 31 bp, Homo Sapiens; identical to SEQ ID NO: 25268

SEQ ID NO: 40936 - DNA, 33 bp, Homo Sapiens; identical to SEQ ID NO: 25270

SEQ ID NO: 40937 - DNA, 34 bp, Homo Sapiens; identical to SEQ ID NO: 25271

SEQ ID NO: 40938 - DNA, 36 bp, Homo Sapiens; identical to SEQ ID NO: 25273

SEQ ID NO: 40939 - DNA, 37 bp, Homo Sapiens; identical to SEQ ID NO: 25274

SEQ ID NO: 40940 - DNA, 21 bp, Homo Sapiens
tcattggtcgtggttgtagtc

SEQ ID NO: 40941 - DNA, 27 bp, Homo Sapiens
tcattggtcgtggttgtagtccgtgcg

SEQ ID NO: 40942 - DNA, 29 bp, Homo Sapiens
tcattggtcgtggttgtagtccgtgcgag

SEQ ID NO: 40943 - DNA, 30 bp, Homo Sapiens; identical to SEQ ID NO: 25296

SEQ ID NO: 40944 - DNA, 31 bp, Homo Sapiens; identical to SEQ ID NO: 25297

SEQ ID NO: 40945 - DNA, 32 bp, Homo Sapiens; identical to SEQ ID NO: 25298

SEQ ID NO: 40946 - DNA, 33 bp, Homo Sapiens; identical to SEQ ID NO: 25299

SEQ ID NO: 40947 - DNA, 34 bp, Homo Sapiens; identical to SEQ ID NO: 25300

SEQ ID NO: 40948 - DNA, 35 bp, Homo Sapiens; identical to SEQ ID NO: 25301

SEQ ID NO: 40949 - DNA, 36 bp, Homo Sapiens; identical to SEQ ID NO: 25302

SEQ ID NO: 40950 - DNA, 40 bp, Homo Sapiens; identical to SEQ ID NO: 25305

SEQ ID NO: 40951 - DNA, 37 bp, Homo Sapiens
tccaatggaggcgtgggttcgaatcccacttctgaca

SEQ ID NO: 40952 - DNA, 38 bp, Homo Sapiens
tccaatggaggcgtgggttcgaatcccacttctgacac

SEQ ID NO: 40953 - DNA, 39 bp, Homo Sapiens; identical to SEQ ID NO: 25320

SEQ ID NO: 40954 - DNA, 16 bp, Homo Sapiens
tccaatggggtttccc

SEQ ID NO: 40955 - DNA, 17 bp, Homo Sapiens
tccaatggggtttcccc

SEQ ID NO: 40956 - DNA, 46 bp, Homo Sapiens; identical to SEQ ID NO: 25326

SEQ ID NO: 40957 - DNA, 47 bp, Homo Sapiens; identical to SEQ ID NO: 25327

SEQ ID NO: 40958 - DNA, 35 bp, Homo Sapiens; identical to SEQ ID NO: 25338

SEQ ID NO: 40959 - DNA, 36 bp, Homo Sapiens; identical to SEQ ID NO: 25339

SEQ ID NO: 40960 - DNA, 37 bp, Homo Sapiens; identical to SEQ ID NO: 25340

SEQ ID NO: 40961 - DNA, 38 bp, Homo Sapiens; identical to SEQ ID NO: 25341

SEQ ID NO: 40962 - DNA, 43 bp, Homo Sapiens
tccagatcagaaggctgcgtgttcgaatcacgtcggggtcacc

SEQ ID NO: 40963 - DNA, 18 bp, Homo Sapiens
tccagatcagaaggttgc

SEQ ID NO: 40964 - DNA, 17 bp, Homo Sapiens
tccagcgatccgagttc

SEQ ID NO: 40965 - DNA, 18 bp, Homo Sapiens
tccagcgatccgagttca

SEQ ID NO: 40966 - DNA, 34 bp, Homo Sapiens; identical to SEQ ID NO: 25349

SEQ ID NO: 40967 - DNA, 35 bp, Homo Sapiens; identical to SEQ ID NO: 25350

SEQ ID NO: 40968 - DNA, 36 bp, Homo Sapiens; identical to SEQ ID NO: 25351

SEQ ID NO: 40969 - DNA, 34 bp, Homo Sapiens; identical to SEQ ID NO: 25361

SEQ ID NO: 40970 - DNA, 16 bp, Homo Sapiens
tccagctcgaaggacc

SEQ ID NO: 40971 - DNA, 26 bp, Homo Sapiens
tccagggttcaagtccctgttcgggc

SEQ ID NO: 40972 - DNA, 27 bp, Homo Sapiens
tccagggttcaagtccctgttcgggcg

SEQ ID NO: 40973 - DNA, 28 bp, Homo Sapiens
tccagggttcaagtccctgttcgggcgc

SEQ ID NO: 40974 - DNA, 29 bp, Homo Sapiens
tccagggttcaagtccctgttcgggcgcc

SEQ ID NO: 40975 - DNA, 30 bp, Homo Sapiens; identical to SEQ ID NO: 25372

SEQ ID NO: 40976 - DNA, 28 bp, Homo Sapiens
tccaggttcgactcctggctggctcgcc

SEQ ID NO: 40977 - DNA, 45 bp, Homo Sapiens; identical to SEQ ID NO: 25383

SEQ ID NO: 40978 - DNA, 44 bp, Homo Sapiens; identical to SEQ ID NO: 25384

SEQ ID NO: 40979 - DNA, 45 bp, Homo Sapiens; identical to SEQ ID NO: 25385

SEQ ID NO: 40980 - DNA, 45 bp, Homo Sapiens
tccagtctcttcgggggcgtgggttcgaatcccaccactgccacc

SEQ ID NO: 40981 - DNA, 44 bp, Homo Sapiens
tccagtctcttcgggggcgtgggttcgaatcccaccgctgccac

SEQ ID NO: 40982 - DNA, 45 bp, Homo Sapiens; identical to SEQ ID NO: 25389

SEQ ID NO: 40983 - DNA, 33 bp, Homo Sapiens; identical to SEQ ID NO: 25397

SEQ ID NO: 40984 - DNA, 26 bp, Homo Sapiens
tccatggtgtaatggttagcactctg

SEQ ID NO: 40985 - DNA, 30 bp, Homo Sapiens; identical to SEQ ID NO: 25420

SEQ ID NO: 40986 - DNA, 31 bp, Homo Sapiens; identical to SEQ ID NO: 25421

SEQ ID NO: 40987 - DNA, 32 bp, Homo Sapiens; identical to SEQ ID NO: 25422

SEQ ID NO: 40988 - DNA, 33 bp, Homo Sapiens; identical to SEQ ID NO: 25423

SEQ ID NO: 40989 - DNA, 34 bp, Homo Sapiens; identical to SEQ ID NO: 25424

SEQ ID NO: 40990 - DNA, 37 bp, Homo Sapiens; identical to SEQ ID NO: 25426

SEQ ID NO: 40991 - DNA, 38 bp, Homo Sapiens; identical to SEQ ID NO: 25427

SEQ ID NO: 40992 - DNA, 16 bp, Homo Sapiens
tccattggggtttccc

SEQ ID NO: 40993 - DNA, 17 bp, Homo Sapiens
tccattggggtttcccc

SEQ ID NO: 40994 - DNA, 20 bp, Homo Sapiens
tccattggggtttccccgcg

SEQ ID NO: 40995 - DNA, 21 bp, Homo Sapiens
tccattggggtttccccgcgc

SEQ ID NO: 40996 - DNA, 22 bp, Homo Sapiens
tccattggggtttccccgcgca

SEQ ID NO: 40997 - DNA, 23 bp, Homo Sapiens
tccattggggtttccccgcgcag

SEQ ID NO: 40998 - DNA, 24 bp, Homo Sapiens
tccattggggtttccccgcgcagg

SEQ ID NO: 40999 - DNA, 25 bp, Homo Sapiens
tccattggggtttccccgcgcaggt

SEQ ID NO: 41000 - DNA, 26 bp, Homo Sapiens
tccattggggtttccccgcgcaggtt

SEQ ID NO: 41001 - DNA, 35 bp, Homo Sapiens; identical to SEQ ID NO: 25438

SEQ ID NO: 41002 - DNA, 45 bp, Homo Sapiens
tccattggggtttccccgcgcaggttcgaatcctgccgactacgc

SEQ ID NO: 41003 - DNA, 46 bp, Homo Sapiens; identical to SEQ ID NO: 25444

SEQ ID NO: 41004 - DNA, 47 bp, Homo Sapiens; identical to SEQ ID NO: 25445

SEQ ID NO: 41005 - DNA, 46 bp, Homo Sapiens; identical to SEQ ID NO: 25461

SEQ ID NO: 41006 - DNA, 47 bp, Homo Sapiens; identical to SEQ ID NO: 25462

SEQ ID NO: 41007 - DNA, 16 bp, Homo Sapiens
tcccacatggtctagc

SEQ ID NO: 41008 - DNA, 17 bp, Homo Sapiens
tcccacatggtctagcg

SEQ ID NO: 41009 - DNA, 18 bp, Homo Sapiens
tcccacatggtctagcgg

SEQ ID NO: 41010 - DNA, 19 bp, Homo Sapiens
tcccacatggtctagcggt

SEQ ID NO: 41011 - DNA, 20 bp, Homo Sapiens
tcccacatggtctagcggtt

SEQ ID NO: 41012 - DNA, 22 bp, Homo Sapiens
tcccacatggtctagcggttag

SEQ ID NO: 41013 - DNA, 23 bp, Homo Sapiens
tcccacatggtctagcggttagg

SEQ ID NO: 41014 - DNA, 24 bp, Homo Sapiens
tcccacatggtctagcggttagga

SEQ ID NO: 41015 - DNA, 25 bp, Homo Sapiens
tcccacatggtctagcggttaggat

SEQ ID NO: 41016 - DNA, 26 bp, Homo Sapiens
tcccacatggtctagcggttaggatt

SEQ ID NO: 41017 - DNA, 27 bp, Homo Sapiens
tcccacatggtctagcggttaggattc

SEQ ID NO: 41018 - DNA, 28 bp, Homo Sapiens
tcccacatggtctagcggttaggattcc

SEQ ID NO: 41019 - DNA, 29 bp, Homo Sapiens
tcccacatggtctagcggttaggattcct

SEQ ID NO: 41020 - DNA, 30 bp, Homo Sapiens; identical to SEQ ID NO: 25476

SEQ ID NO: 41021 - DNA, 31 bp, Homo Sapiens; identical to SEQ ID NO: 25477

SEQ ID NO: 41022 - DNA, 32 bp, Homo Sapiens; identical to SEQ ID NO: 25478

SEQ ID NO: 41023 - DNA, 33 bp, Homo Sapiens; identical to SEQ ID NO: 25479

SEQ ID NO: 41024 - DNA, 34 bp, Homo Sapiens; identical to SEQ ID NO: 25480

SEQ ID NO: 41025 - DNA, 35 bp, Homo Sapiens; identical to SEQ ID NO: 25481

SEQ ID NO: 41026 - DNA, 36 bp, Homo Sapiens; identical to SEQ ID NO: 25482

SEQ ID NO: 41027 - DNA, 37 bp, Homo Sapiens; identical to SEQ ID NO: 25483

SEQ ID NO: 41028 - DNA, 38 bp, Homo Sapiens; identical to SEQ ID NO: 25484

SEQ ID NO: 41029 - DNA, 39 bp, Homo Sapiens; identical to SEQ ID NO: 25485

SEQ ID NO: 41030 - DNA, 40 bp, Homo Sapiens; identical to SEQ ID NO: 25486

SEQ ID NO: 41031 - DNA, 41 bp, Homo Sapiens; identical to SEQ ID NO: 25487

SEQ ID NO: 41032 - DNA, 42 bp, Homo Sapiens; identical to SEQ ID NO: 25488

SEQ ID NO: 41033 - DNA, 43 bp, Homo Sapiens
tcccacatggtctagcggttaggattcctggttttcacccagg

SEQ ID NO: 41034 - DNA, 16 bp, Homo Sapiens
tcccaccactgccacc

SEQ ID NO: 41035 - DNA, 16 bp, Homo Sapiens
tcccaccagagtcgcc

SEQ ID NO: 41036 - DNA, 17 bp, Homo Sapiens
tcccacccagggacgcc

SEQ ID NO: 41037 - DNA, 16 bp, Homo Sapiens
tcccaccctcgtcgcc

SEQ ID NO: 41038 - DNA, 16 bp, Homo Sapiens
tcccaccgctgccacc

SEQ ID NO: 41039 - DNA, 17 bp, Homo Sapiens
tcccaccgctgccacca

SEQ ID NO: 41040 - DNA, 16 bp, Homo Sapiens
tcccacctggggtacc

SEQ ID NO: 41041 - DNA, 17 bp, Homo Sapiens
tcccacctggggtgcca

SEQ ID NO: 41042 - DNA, 16 bp, Homo Sapiens
tcccaccttcgtcgcc

SEQ ID NO: 41043 - DNA, 16 bp, Homo Sapiens
tcccactcctgacacc

SEQ ID NO: 41044 - DNA, 17 bp, Homo Sapiens
tcccactcctgacacca

SEQ ID NO: 41045 - DNA, 16 bp, Homo Sapiens
tcccacttctgacacc

SEQ ID NO: 41046 - DNA, 17 bp, Homo Sapiens
tcccacttctgacacca

SEQ ID NO: 41047 - DNA, 16 bp, Homo Sapiens
tcccagcggggcctcc

SEQ ID NO: 41048 - DNA, 17 bp, Homo Sapiens
tcccagcggggcctcca

SEQ ID NO: 41049 - DNA, 16 bp, Homo Sapiens
tcccagcggtgcctcc

SEQ ID NO: 41050 - DNA, 17 bp, Homo Sapiens
tcccagcggtgcctcca

SEQ ID NO: 41051 - DNA, 37 bp, Homo Sapiens; identical to SEQ ID NO: 25512

SEQ ID NO: 41052 - DNA, 38 bp, Homo Sapiens; identical to SEQ ID NO: 25513

SEQ ID NO: 41053 - DNA, 16 bp, Homo Sapiens
tcccagtagagcctcc

SEQ ID NO: 41054 - DNA, 16 bp, Homo Sapiens
tcccatatggtctagc

SEQ ID NO: 41055 - DNA, 17 bp, Homo Sapiens
tcccatatggtctagcg

SEQ ID NO: 41056 - DNA, 18 bp, Homo Sapiens
tcccatatggtctagcgg

SEQ ID NO: 41057 - DNA, 19 bp, Homo Sapiens
tcccatatggtctagcggt

SEQ ID NO: 41058 - DNA, 22 bp, Homo Sapiens
tcccatatggtctagcggttag

SEQ ID NO: 41059 - DNA, 23 bp, Homo Sapiens
tcccatatggtctagcggttagg

SEQ ID NO: 41060 - DNA, 24 bp, Homo Sapiens
tcccatatggtctagcggttagga

SEQ ID NO: 41061 - DNA, 25 bp, Homo Sapiens
tcccatatggtctagcggttaggat

SEQ ID NO: 41062 - DNA, 26 bp, Homo Sapiens
tcccatatggtctagcggttaggatt

SEQ ID NO: 41063 - DNA, 27 bp, Homo Sapiens
tcccatatggtctagcggttaggattc

SEQ ID NO: 41064 - DNA, 28 bp, Homo Sapiens
tcccatatggtctagcggttaggattcc

SEQ ID NO: 41065 - DNA, 29 bp, Homo Sapiens
tcccatatggtctagcggttaggattcct

SEQ ID NO: 41066 - DNA, 30 bp, Homo Sapiens; identical to SEQ ID NO: 25530

SEQ ID NO: 41067 - DNA, 31 bp, Homo Sapiens; identical to SEQ ID NO: 25531

SEQ ID NO: 41068 - DNA, 32 bp, Homo Sapiens; identical to SEQ ID NO: 25532

SEQ ID NO: 41069 - DNA, 33 bp, Homo Sapiens; identical to SEQ ID NO: 25533

SEQ ID NO: 41070 - DNA, 34 bp, Homo Sapiens; identical to SEQ ID NO: 25534

SEQ ID NO: 41071 - DNA, 35 bp, Homo Sapiens; identical to SEQ ID NO: 25535

SEQ ID NO: 41072 - DNA, 36 bp, Homo Sapiens; identical to SEQ ID NO: 25536

SEQ ID NO: 41073 - DNA, 37 bp, Homo Sapiens; identical to SEQ ID NO: 25537

SEQ ID NO: 41074 - DNA, 40 bp, Homo Sapiens; identical to SEQ ID NO: 25540

SEQ ID NO: 41075 - DNA, 41 bp, Homo Sapiens; identical to SEQ ID NO: 25541

SEQ ID NO: 41076 - DNA, 42 bp, Homo Sapiens; identical to SEQ ID NO: 25542

SEQ ID NO: 41077 - DNA, 43 bp, Homo Sapiens; identical to SEQ ID NO: 25543

SEQ ID NO: 41078 - DNA, 16 bp, Homo Sapiens
tcccatcctcgtcgcc

SEQ ID NO: 41079 - DNA, 17 bp, Homo Sapiens
tcccatcctcgtcgcca

SEQ ID NO: 41080 - DNA, 16 bp, Homo Sapiens
tcccatctggggtgcc

SEQ ID NO: 41081 - DNA, 17 bp, Homo Sapiens
tcccatctggggtgcca

SEQ ID NO: 41082 - DNA, 16 bp, Homo Sapiens
tcccatctgggtcgcc

SEQ ID NO: 41083 - DNA, 28 bp, Homo Sapiens
tcccatggtgtaatggttagcactctgg

SEQ ID NO: 41084 - DNA, 31 bp, Homo Sapiens; identical to SEQ ID NO: 25557

SEQ ID NO: 41085 - DNA, 34 bp, Homo Sapiens; identical to SEQ ID NO: 25559

SEQ ID NO: 41086 - DNA, 35 bp, Homo Sapiens; identical to SEQ ID NO: 25560

SEQ ID NO: 41087 - DNA, 16 bp, Homo Sapiens
tcccattggtctagcc

SEQ ID NO: 41088 - DNA, 16 bp, Homo Sapiens
tccccagcatctccac

SEQ ID NO: 41089 - DNA, 17 bp, Homo Sapiens
tccccagcatctccacc

SEQ ID NO: 41090 - DNA, 18 bp, Homo Sapiens
tccccagcatctccacca

SEQ ID NO: 41091 - DNA, 17 bp, Homo Sapiens
tccccagtacctccacc

SEQ ID NO: 41092 - DNA, 16 bp, Homo Sapiens
tccccgacggggagcc

SEQ ID NO: 41093 - DNA, 22 bp, Homo Sapiens
tccccgcgcaggttcgaatcct

SEQ ID NO: 41094 - DNA, 34 bp, Homo Sapiens; identical to SEQ ID NO: 25596

SEQ ID NO: 41095 - DNA, 16 bp, Homo Sapiens
tccccggcacctccac

SEQ ID NO: 41096 - DNA, 17 bp, Homo Sapiens
tccccggcacctccacc

SEQ ID NO: 41097 - DNA, 18 bp, Homo Sapiens
tccccggcacctccacca

SEQ ID NO: 41098 - DNA, 16 bp, Homo Sapiens
tccccggcatctccac

SEQ ID NO: 41099 - DNA, 17 bp, Homo Sapiens
tccccggcatctccacc

SEQ ID NO: 41100 - DNA, 18 bp, Homo Sapiens
tccccggcatctccacca

SEQ ID NO: 41101 - DNA, 16 bp, Homo Sapiens
tccccgtacgggccac

SEQ ID NO: 41102 - DNA, 17 bp, Homo Sapiens
tccccgtacgggccacc

SEQ ID NO: 41103 - DNA, 18 bp, Homo Sapiens
tccccgtacgggccacca

SEQ ID NO: 41104 - DNA, 16 bp, Homo Sapiens
tccccgtactggccac

SEQ ID NO: 41105 - DNA, 17 bp, Homo Sapiens
tccccgtactggccacc

SEQ ID NO: 41106 - DNA, 16 bp, Homo Sapiens
tcccggacgagccccc

SEQ ID NO: 41107 - DNA, 17 bp, Homo Sapiens
tcccggacgagccccca

SEQ ID NO: 41108 - DNA, 16 bp, Homo Sapiens
tcccggccaacgcacc

SEQ ID NO: 41109 - DNA, 17 bp, Homo Sapiens
tcccggccaacgcacca

SEQ ID NO: 41110 - DNA, 16 bp, Homo Sapiens
tcccggccaatgcacc

SEQ ID NO: 41111 - DNA, 17 bp, Homo Sapiens
tcccggccaatgcacca

SEQ ID NO: 41112 - DNA, 16 bp, Homo Sapiens
tcccggccactgcacc

SEQ ID NO: 41113 - DNA, 17 bp, Homo Sapiens
tcccggccactgcacca

SEQ ID NO: 41114 - DNA, 17 bp, Homo Sapiens
tcccggccagtgcacca

SEQ ID NO: 41115 - DNA, 16 bp, Homo Sapiens
tcccggcccatgcacc

SEQ ID NO: 41116 - DNA, 17 bp, Homo Sapiens
tcccggcccatgcacca

SEQ ID NO: 41117 - DNA, 16 bp, Homo Sapiens
tcccggcggagtcgcc

SEQ ID NO: 41118 - DNA, 16 bp, Homo Sapiens
tcccgggcggaaacac

SEQ ID NO: 41119 - DNA, 17 bp, Homo Sapiens
tcccgggcggaaacacc

SEQ ID NO: 41120 - DNA, 16 bp, Homo Sapiens
tcccgggcggcgcacc

SEQ ID NO: 41121 - DNA, 17 bp, Homo Sapiens
tcccgggcggcgcacca

SEQ ID NO: 41122 - DNA, 27 bp, Homo Sapiens
tcccgggttcaaatcccggacgagccc

SEQ ID NO: 41123 - DNA, 28 bp, Homo Sapiens
tcccgggttcaaatcccggacgagcccc

SEQ ID NO: 41124 - DNA, 29 bp, Homo Sapiens
tcccgggttcgatccccagcatctccacc

SEQ ID NO: 41125 - DNA, 16 bp, Homo Sapiens
tcccgggtttcggcac

SEQ ID NO: 41126 - DNA, 17 bp, Homo Sapiens
tcccgggtttcggcacc

SEQ ID NO: 41127 - DNA, 18 bp, Homo Sapiens
tcccgggtttcggcacca

SEQ ID NO: 41128 - DNA, 16 bp, Homo Sapiens
tcccggtatgggaacc

SEQ ID NO: 41129 - DNA, 16 bp, Homo Sapiens
tcccggtcagggaacc

SEQ ID NO: 41130 - DNA, 16 bp, Homo Sapiens
tcccggtcatggaacc

SEQ ID NO: 41131 - DNA, 16 bp, Homo Sapiens
tcccggtgtgggaacc

SEQ ID NO: 41132 - DNA, 17 bp, Homo Sapiens
tcccggtgtgggaacca

SEQ ID NO: 41133 - DNA, 19 bp, Homo Sapiens
tccctggtagtctagtggc

SEQ ID NO: 41134 - DNA, 22 bp, Homo Sapiens
tccctggtctagtggttaggat

SEQ ID NO: 41135 - DNA, 23 bp, Homo Sapiens
tccctggtctagtggttaggatt

SEQ ID NO: 41136 - DNA, 16 bp, Homo Sapiens
tccctggtggtctagt

SEQ ID NO: 41137 - DNA, 17 bp, Homo Sapiens
tccctggtggtctagtg

SEQ ID NO: 41138 - DNA, 18 bp, Homo Sapiens
tccctggtggtctagtgg

SEQ ID NO: 41139 - DNA, 19 bp, Homo Sapiens
tccctggtggtctagtggc

SEQ ID NO: 41140 - DNA, 20 bp, Homo Sapiens
tccctggtggtctagtggct

SEQ ID NO: 41141 - DNA, 22 bp, Homo Sapiens
tccctggtggtctagtggctag

SEQ ID NO: 41142 - DNA, 23 bp, Homo Sapiens
tccctggtggtctagtggctagg

SEQ ID NO: 41143 - DNA, 24 bp, Homo Sapiens
tccctggtggtctagtggctagga

SEQ ID NO: 41144 - DNA, 25 bp, Homo Sapiens
tccctggtggtctagtggctaggat

SEQ ID NO: 41145 - DNA, 26 bp, Homo Sapiens
tccctggtggtctagtggctaggatt

SEQ ID NO: 41146 - DNA, 27 bp, Homo Sapiens
tccctggtggtctagtggctaggattc

SEQ ID NO: 41147 - DNA, 28 bp, Homo Sapiens
tccctggtggtctagtggctaggattcg

SEQ ID NO: 41148 - DNA, 29 bp, Homo Sapiens
tccctggtggtctagtggctaggattcgg

SEQ ID NO: 41149 - DNA, 30 bp, Homo Sapiens; identical to SEQ ID NO: 25675

SEQ ID NO: 41150 - DNA, 31 bp, Homo Sapiens; identical to SEQ ID NO: 25676

SEQ ID NO: 41151 - DNA, 32 bp, Homo Sapiens; identical to SEQ ID NO: 25677

SEQ ID NO: 41152 - DNA, 33 bp, Homo Sapiens; identical to SEQ ID NO: 25678

SEQ ID NO: 41153 - DNA, 34 bp, Homo Sapiens; identical to SEQ ID NO: 25679

SEQ ID NO: 41154 - DNA, 35 bp, Homo Sapiens; identical to SEQ ID NO: 25680

SEQ ID NO: 41155 - DNA, 36 bp, Homo Sapiens; identical to SEQ ID NO: 25681

SEQ ID NO: 41156 - DNA, 39 bp, Homo Sapiens; identical to SEQ ID NO: 25684

SEQ ID NO: 41157 - DNA, 19 bp, Homo Sapiens
tccctggtggtctagtggt

SEQ ID NO: 41158 - DNA, 22 bp, Homo Sapiens
tccctggtggtctagtggttag

SEQ ID NO: 41159 - DNA, 23 bp, Homo Sapiens
tccctggtggtctagtggttagg

SEQ ID NO: 41160 - DNA, 24 bp, Homo Sapiens
tccctggtggtctagtggttagga

SEQ ID NO: 41161 - DNA, 25 bp, Homo Sapiens
tccctggtggtctagtggttaggat

SEQ ID NO: 41162 - DNA, 26 bp, Homo Sapiens
tccctggtggtctagtggttaggatt

SEQ ID NO: 41163 - DNA, 27 bp, Homo Sapiens
tccctggtggtctagtggttaggattc

SEQ ID NO: 41164 - DNA, 28 bp, Homo Sapiens
tccctggtggtctagtggttaggattcg

SEQ ID NO: 41165 - DNA, 29 bp, Homo Sapiens
tccctggtggtctagtggttaggattcgg

SEQ ID NO: 41166 - DNA, 30 bp, Homo Sapiens; identical to SEQ ID NO: 25700

SEQ ID NO: 41167 - DNA, 31 bp, Homo Sapiens; identical to SEQ ID NO: 25701

SEQ ID NO: 41168 - DNA, 32 bp, Homo Sapiens; identical to SEQ ID NO: 25702

SEQ ID NO: 41169 - DNA, 33 bp, Homo Sapiens; identical to SEQ ID NO: 25703

SEQ ID NO: 41170 - DNA, 34 bp, Homo Sapiens; identical to SEQ ID NO: 25704

SEQ ID NO: 41171 - DNA, 35 bp, Homo Sapiens; identical to SEQ ID NO: 25705

SEQ ID NO: 41172 - DNA, 36 bp, Homo Sapiens; identical to SEQ ID NO: 25706

SEQ ID NO: 41173 - DNA, 37 bp, Homo Sapiens; identical to SEQ ID NO: 25707

SEQ ID NO: 41174 - DNA, 38 bp, Homo Sapiens; identical to SEQ ID NO: 25708

SEQ ID NO: 41175 - DNA, 39 bp, Homo Sapiens; identical to SEQ ID NO: 25709

SEQ ID NO: 41176 - DNA, 40 bp, Homo Sapiens; identical to SEQ ID NO: 25710

SEQ ID NO: 41177 - DNA, 41 bp, Homo Sapiens; identical to SEQ ID NO: 25711

SEQ ID NO: 41178 - DNA, 42 bp, Homo Sapiens; identical to SEQ ID NO: 25712

SEQ ID NO: 41179 - DNA, 43 bp, Homo Sapiens; identical to SEQ ID NO: 25713

SEQ ID NO: 41180 - DNA, 44 bp, Homo Sapiens; identical to SEQ ID NO: 25714

SEQ ID NO: 41181 - DNA, 45 bp, Homo Sapiens; identical to SEQ ID NO: 25715

SEQ ID NO: 41182 - DNA, 46 bp, Homo Sapiens; identical to SEQ ID NO: 25716

SEQ ID NO: 41183 - DNA, 47 bp, Homo Sapiens; identical to SEQ ID NO: 25717

SEQ ID NO: 41184 - DNA, 28 bp, Homo Sapiens
tccctggttcgatcccgggtttcggcac

SEQ ID NO: 41185 - DNA, 16 bp, Homo Sapiens
tccctgtccaggcgcc

SEQ ID NO: 41186 - DNA, 16 bp, Homo Sapiens
tccctgtggtctagtg

SEQ ID NO: 41187 - DNA, 17 bp, Homo Sapiens
tccctgtggtctagtgg

SEQ ID NO: 41188 - DNA, 18 bp, Homo Sapiens
tccctgtggtctagtggt

SEQ ID NO: 41189 - DNA, 21 bp, Homo Sapiens
tccctgtggtctagtggttag

SEQ ID NO: 41190 - DNA, 22 bp, Homo Sapiens
tccctgtggtctagtggttagg

SEQ ID NO: 41191 - DNA, 23 bp, Homo Sapiens
tccctgtggtctagtggttagga

SEQ ID NO: 41192 - DNA, 16 bp, Homo Sapiens
tccctgttcaggcgcc

SEQ ID NO: 41193 - DNA, 16 bp, Homo Sapiens
tccctgttcgggcgcc

SEQ ID NO: 41194 - DNA, 17 bp, Homo Sapiens
tccctgttcgggcgcca

SEQ ID NO: 41195 - DNA, 16 bp, Homo Sapiens
tcccttcgtggtcgcc

SEQ ID NO: 41196 - DNA, 17 bp, Homo Sapiens
tcccttcgtggtcgcca

SEQ ID NO: 41197 - DNA, 16 bp, Homo Sapiens
tcccttcgtggttgcc

SEQ ID NO: 41198 - DNA, 34 bp, Homo Sapiens
tccgagaggtcccgggttcaaatcccggacgagc

SEQ ID NO: 41199 - DNA, 35 bp, Homo Sapiens; identical to SEQ ID NO: 25745

SEQ ID NO: 41200 - DNA, 36 bp, Homo Sapiens
tccgagaggtcccgggttcaaatcccggacgagccc

SEQ ID NO: 41201 - DNA, 37 bp, Homo Sapiens; identical to SEQ ID NO: 25746

SEQ ID NO: 41202 - DNA, 38 bp, Homo Sapiens; identical to SEQ ID NO: 25747

SEQ ID NO: 41203 - DNA, 39 bp, Homo Sapiens
tccgagaggtcccgggttcaaatcccggacgagccccca

SEQ ID NO: 41204 - DNA, 16 bp, Homo Sapiens
tccgagtcacggcacc

SEQ ID NO: 41205 - DNA, 17 bp, Homo Sapiens
tccgagtcacggcacca

SEQ ID NO: 41206 - DNA, 27 bp, Homo Sapiens
tccgagttcaaatctcggtggaacctc

SEQ ID NO: 41207 - DNA, 26 bp, Homo Sapiens
tccgagttcaaatctcggtgggacct

SEQ ID NO: 41208 - DNA, 27 bp, Homo Sapiens
tccgagttcaaatctcggtgggacctc

SEQ ID NO: 41209 - DNA, 16 bp, Homo Sapiens
tccgagttcgagtctc

SEQ ID NO: 41210 - DNA, 43 bp, Homo Sapiens
tccggagctggggattgtgggttcgagtcccatctgggtcgcc

SEQ ID NO: 41211 - DNA, 18 bp, Homo Sapiens
tccggatcagaagattga

SEQ ID NO: 41212 - DNA, 43 bp, Homo Sapiens
tccggatcagaagattgagggttcgagtcccttcgtggtcgcc

SEQ ID NO: 41213 - DNA, 19 bp, Homo Sapiens
tccggatggaggcgtgggt

SEQ ID NO: 41214 - DNA, 29 bp, Homo Sapiens
tccggatggaggcgtgggttcgaatccca

SEQ ID NO: 41215 - DNA, 38 bp, Homo Sapiens; identical to SEQ ID NO: 25794

SEQ ID NO: 41216 - DNA, 39 bp, Homo Sapiens; identical to SEQ ID NO: 25795

SEQ ID NO: 41217 - DNA, 40 bp, Homo Sapiens; identical to SEQ ID NO: 25796

SEQ ID NO: 41218 - DNA, 16 bp, Homo Sapiens
tccggctcgaaggacc

SEQ ID NO: 41219 - DNA, 17 bp, Homo Sapiens
tccggctcgaaggacca

SEQ ID NO: 41220 - DNA, 16 bp, Homo Sapiens
tccggctcggaggacc

SEQ ID NO: 41221 - DNA, 17 bp, Homo Sapiens
tccggctcggaggacca

SEQ ID NO: 41222 - DNA, 28 bp, Homo Sapiens
tccggggttcaagtccctgttcgggcgc

SEQ ID NO: 41223 - DNA, 16 bp, Homo Sapiens
tccgggtgccccctcc

SEQ ID NO: 41224 - DNA, 17 bp, Homo Sapiens
tccgggtgccccctcca

SEQ ID NO: 41225 - DNA, 27 bp, Homo Sapiens
tccgggttcgagtcccggcggagtcgc

SEQ ID NO: 41226 - DNA, 28 bp, Homo Sapiens
tccgggttcgagtcccggcggagtcgcc

SEQ ID NO: 41227 - DNA, 20 bp, Homo Sapiens
tccgtagtgtagtggtcatc

SEQ ID NO: 41228 - DNA, 29 bp, Homo Sapiens
tccgtagtgtagtggtcatcacgttcgcc

SEQ ID NO: 41229 - DNA, 30 bp, Homo Sapiens; identical to SEQ ID NO: 25831

SEQ ID NO: 41230 - DNA, 20 bp, Homo Sapiens
tccgtagtgtagtggttatc

SEQ ID NO: 41231 - DNA, 21 bp, Homo Sapiens
tccgtagtgtagtggttatca

SEQ ID NO: 41232 - DNA, 29 bp, Homo Sapiens
tccgtagtgtagtggttatcacgttcgcc

SEQ ID NO: 41233 - DNA, 30 bp, Homo Sapiens; identical to SEQ ID NO: 25843

SEQ ID NO: 41234 - DNA, 31 bp, Homo Sapiens; identical to SEQ ID NO: 25847

SEQ ID NO: 41235 - DNA, 33 bp, Homo Sapiens; identical to SEQ ID NO: 25849

SEQ ID NO: 41236 - DNA, 16 bp, Homo Sapiens
tccgtggtggtctagt

SEQ ID NO: 41237 - DNA, 17 bp, Homo Sapiens
tccgtggtggtctagtg

SEQ ID NO: 41238 - DNA, 19 bp, Homo Sapiens
tccgtggtggtctagtggc

SEQ ID NO: 41239 - DNA, 32 bp, Homo Sapiens; identical to SEQ ID NO: 25865

SEQ ID NO: 41240 - DNA, 33 bp, Homo Sapiens; identical to SEQ ID NO: 25866

SEQ ID NO: 41241 - DNA, 34 bp, Homo Sapiens
tccgtggtggtctagtggctaggattcggcgctt

SEQ ID NO: 41242 - DNA, 32 bp, Homo Sapiens; identical to SEQ ID NO: 25867

SEQ ID NO: 41243 - DNA, 43 bp, Homo Sapiens; identical to SEQ ID NO: 25873

SEQ ID NO: 41244 - DNA, 44 bp, Homo Sapiens; identical to SEQ ID NO: 25874

SEQ ID NO: 41245 - DNA, 16 bp, Homo Sapiens
tcctcacacggggcac

SEQ ID NO: 41246 - DNA, 17 bp, Homo Sapiens
tcctcacacggggcacc

SEQ ID NO: 41247 - DNA, 16 bp, Homo Sapiens
tcctcacctggagcac

SEQ ID NO: 41248 - DNA, 17 bp, Homo Sapiens
tcctcacctggagcacc

SEQ ID NO: 41249 - DNA, 18 bp, Homo Sapiens
tcctcacctggagcacca

SEQ ID NO: 41250 - DNA, 16 bp, Homo Sapiens
tcctcgctggggcctc

SEQ ID NO: 41251 - DNA, 17 bp, Homo Sapiens
tcctcgctggggcctcc

SEQ ID NO: 41252 - DNA, 16 bp, Homo Sapiens
tcctcgttagtatagt

SEQ ID NO: 41253 - DNA, 17 bp, Homo Sapiens
tcctcgttagtatagtg

SEQ ID NO: 41254 - DNA, 18 bp, Homo Sapiens
tcctcgttagtatagtgg

SEQ ID NO: 41255 - DNA, 22 bp, Homo Sapiens
tcctcgttagtatagtggtgag

SEQ ID NO: 41256 - DNA, 23 bp, Homo Sapiens
tcctcgttagtatagtggtgagt

SEQ ID NO: 41257 - DNA, 26 bp, Homo Sapiens
tcctcgttagtatagtggtgagtatc

SEQ ID NO: 41258 - DNA, 31 bp, Homo Sapiens; identical to SEQ ID NO: 25907

SEQ ID NO: 41259 - DNA, 32 bp, Homo Sapiens; identical to SEQ ID NO: 25908

SEQ ID NO: 41260 - DNA, 33 bp, Homo Sapiens; identical to SEQ ID NO: 25909

SEQ ID NO: 41261 - DNA, 34 bp, Homo Sapiens; identical to SEQ ID NO: 25910

SEQ ID NO: 41262 - DNA, 35 bp, Homo Sapiens; identical to SEQ ID NO: 25911

SEQ ID NO: 41263 - DNA, 36 bp, Homo Sapiens; identical to SEQ ID NO: 25912

SEQ ID NO: 41264 - DNA, 26 bp, Homo Sapiens
tcctcgttagtatagtggttagtatc

SEQ ID NO: 41265 - DNA, 32 bp, Homo Sapiens; identical to SEQ ID NO: 25930

SEQ ID NO: 41266 - DNA, 33 bp, Homo Sapiens; identical to SEQ ID NO: 25931

SEQ ID NO: 41267 - DNA, 34 bp, Homo Sapiens; identical to SEQ ID NO: 25932

SEQ ID NO: 41268 - DNA, 35 bp, Homo Sapiens; identical to SEQ ID NO: 25933

SEQ ID NO: 41269 - DNA, 36 bp, Homo Sapiens; identical to SEQ ID NO: 25934

SEQ ID NO: 41270 - DNA, 16 bp, Homo Sapiens
tcctgccgactacgcc

SEQ ID NO: 41271 - DNA, 17 bp, Homo Sapiens
tcctgccgactacgcca

SEQ ID NO: 41272 - DNA, 16 bp, Homo Sapiens
tcctgccgcggtcgcc

SEQ ID NO: 41273 - DNA, 17 bp, Homo Sapiens
tcctgccgcggtcgcca

SEQ ID NO: 41274 - DNA, 16 bp, Homo Sapiens
tcctgctcacagcgcc

SEQ ID NO: 41275 - DNA, 17 bp, Homo Sapiens
tcctgctcacagcgcca

SEQ ID NO: 41276 - DNA, 16 bp, Homo Sapiens
tcctggctggctcgcc

SEQ ID NO: 41277 - DNA, 17 bp, Homo Sapiens
tcctggctggctcgcca

SEQ ID NO: 41278 - DNA, 28 bp, Homo Sapiens
tcctgggttcgaatcccagcggggcctc

SEQ ID NO: 41279 - DNA, 28 bp, Homo Sapiens
tcctgggttcgaatcccagcggtgcctc

SEQ ID NO: 41280 - DNA, 29 bp, Homo Sapiens
tcctgggttcgaatcccagcggtgcctcc

SEQ ID NO: 41281 - DNA, 28 bp, Homo Sapiens
tcctgggttcgagccccagtggaaccac

SEQ ID NO: 41282 - DNA, 29 bp, Homo Sapiens
tcctgggttcgagccccagtggaaccacc

SEQ ID NO: 41283 - DNA, 47 bp, Homo Sapiens
tcctggttttcacccaggcggcccgggttcgactcccggtgtgggaa

SEQ ID NO: 41284 - DNA, 16 bp, Homo Sapiens
tcctgtcggctacgcc

SEQ ID NO: 41285 - DNA, 17 bp, Homo Sapiens
tcctgtcggctacgcca

SEQ ID NO: 41286 - DNA, 16 bp, Homo Sapiens
tcctgttcgtgacgcc

SEQ ID NO: 41287 - DNA, 17 bp, Homo Sapiens
tcctgttcgtgacgcca

SEQ ID NO: 41288 - DNA, 18 bp, Homo Sapiens
tccttaggtcgctggttc

SEQ ID NO: 41289 - DNA, 19 bp, Homo Sapiens
tccttaggtcgctggttcg

SEQ ID NO: 41290 - DNA, 16 bp, Homo Sapiens
tcgaaaccatcctctg

SEQ ID NO: 41291 - DNA, 18 bp, Homo Sapiens
tcgaaaccatcctctgct

SEQ ID NO: 41292 - DNA, 20 bp, Homo Sapiens
tcgaaaccatcctctgctac

SEQ ID NO: 41293 - DNA, 21 bp, Homo Sapiens
tcgaaaccatcctctgctacc

SEQ ID NO: 41294 - DNA, 22 bp, Homo Sapiens
tcgaaaccatcctctgctacca

SEQ ID NO: 41295 - DNA, 20 bp, Homo Sapiens
tcgaaaccgggcagaagcac

SEQ ID NO: 41296 - DNA, 21 bp, Homo Sapiens
tcgaaaccgggcagaagcacc

SEQ ID NO: 41297 - DNA, 22 bp, Homo Sapiens
tcgaaaccgggcagaagcacca

SEQ ID NO: 41298 - DNA, 16 bp, Homo Sapiens
tcgaaaccgggcggaa

SEQ ID NO: 41299 - DNA, 17 bp, Homo Sapiens
tcgaaaccgggcggaaa

SEQ ID NO: 41300 - DNA, 18 bp, Homo Sapiens
tcgaaaccgggcggaaac

SEQ ID NO: 41301 - DNA, 19 bp, Homo Sapiens
tcgaaaccgggcggaaaca

SEQ ID NO: 41302 - DNA, 20 bp, Homo Sapiens
tcgaaaccgggcggaaacac

SEQ ID NO: 41303 - DNA, 21 bp, Homo Sapiens
tcgaaaccgggcggaaacacc

SEQ ID NO: 41304 - DNA, 22 bp, Homo Sapiens
tcgaaaccgggcggaaacacca

SEQ ID NO: 41305 - DNA, 23 bp, Homo Sapiens
tcgaaatccaatggggtttcccc

SEQ ID NO: 41306 - DNA, 18 bp, Homo Sapiens
tcgaaccccgtccgtgcc

SEQ ID NO: 41307 - DNA, 19 bp, Homo Sapiens
tcgaaccccgtccgtgcct

SEQ ID NO: 41308 - DNA, 20 bp, Homo Sapiens
tcgaaccccgtccgtgcctc

SEQ ID NO: 41309 - DNA, 21 bp, Homo Sapiens
tcgaaccccgtccgtgcctcc

SEQ ID NO: 41310 - DNA, 21 bp, Homo Sapiens
tcgaaccctgctcgctgcgcc

SEQ ID NO: 41311 - DNA, 21 bp, Homo Sapiens
tcgaacctcagagggggcacc

SEQ ID NO: 41312 - DNA, 16 bp, Homo Sapiens
tcgaagaagcagcttc

SEQ ID NO: 41313 - DNA, 23 bp, Homo Sapiens
tcgaagaagcagcttcaaacctg

SEQ ID NO: 41314 - DNA, 28 bp, Homo Sapiens
tcgaagaagcagcttcaaacctgccggg

SEQ ID NO: 41315 - DNA, 29 bp, Homo Sapiens
tcgaagaagcagcttcaaacctgccgggg

SEQ ID NO: 41316 - DNA, 30 bp, Homo Sapiens; identical to SEQ ID NO: 26039

SEQ ID NO: 41317 - DNA, 31 bp, Homo Sapiens; identical to SEQ ID NO: 26040

SEQ ID NO: 41318 - DNA, 32 bp, Homo Sapiens; identical to SEQ ID NO: 26041

SEQ ID NO: 41319 - DNA, 33 bp, Homo Sapiens; identical to SEQ ID NO: 26042

SEQ ID NO: 41320 - DNA, 34 bp, Homo Sapiens; identical to SEQ ID NO: 26043

SEQ ID NO: 41321 - DNA, 35 bp, Homo Sapiens; identical to SEQ ID NO: 26044

SEQ ID NO: 41322 - DNA, 18 bp, Homo Sapiens
tcgaatcacgtcggggtc

SEQ ID NO: 41323 - DNA, 19 bp, Homo Sapiens
tcgaatcacgtcggggtca

SEQ ID NO: 41324 - DNA, 20 bp, Homo Sapiens
tcgaatcacgtcggggtcac

SEQ ID NO: 41325 - DNA, 21 bp, Homo Sapiens
tcgaatcacgtcggggtcacc

SEQ ID NO: 41326 - DNA, 22 bp, Homo Sapiens
tcgaatcacgtcggggtcacca

SEQ ID NO: 41327 - DNA, 20 bp, Homo Sapiens
tcgaatcccaccactgccac

SEQ ID NO: 41328 - DNA, 21 bp, Homo Sapiens
tcgaatcccaccactgccacc

SEQ ID NO: 41329 - DNA, 21 bp, Homo Sapiens
tcgaatcccaccagagtcgcc

SEQ ID NO: 41330 - DNA, 19 bp, Homo Sapiens
tcgaatcccaccgctgcca

SEQ ID NO: 41331 - DNA, 20 bp, Homo Sapiens
tcgaatcccaccgctgccac

SEQ ID NO: 41332 - DNA, 21 bp, Homo Sapiens
tcgaatcccaccgctgccacc

SEQ ID NO: 41333 - DNA, 22 bp, Homo Sapiens
tcgaatcccaccgctgccacca

SEQ ID NO: 41334 - DNA, 21 bp, Homo Sapiens
tcgaatcccaccttcgtcgcc

SEQ ID NO: 41335 - DNA, 19 bp, Homo Sapiens
tcgaatcccactcctgaca

SEQ ID NO: 41336 - DNA, 20 bp, Homo Sapiens
tcgaatcccactcctgacac

SEQ ID NO: 41337 - DNA, 21 bp, Homo Sapiens
tcgaatcccactcctgacacc

SEQ ID NO: 41338 - DNA, 22 bp, Homo Sapiens
tcgaatcccactcctgacacca

SEQ ID NO: 41339 - DNA, 19 bp, Homo Sapiens
tcgaatcccacttctgaca

SEQ ID NO: 41340 - DNA, 20 bp, Homo Sapiens
tcgaatcccacttctgacac

SEQ ID NO: 41341 - DNA, 21 bp, Homo Sapiens
tcgaatcccacttctgacacc

SEQ ID NO: 41342 - DNA, 22 bp, Homo Sapiens
tcgaatcccacttctgacacca

SEQ ID NO: 41343 - DNA, 20 bp, Homo Sapiens
tcgaatcccagcggggcctc

SEQ ID NO: 41344 - DNA, 21 bp, Homo Sapiens
tcgaatcccagcggggcctcc

SEQ ID NO: 41345 - DNA, 16 bp, Homo Sapiens
tcgaatcccagcggtg

SEQ ID NO: 41346 - DNA, 18 bp, Homo Sapiens
tcgaatcccagcggtgcc

SEQ ID NO: 41347 - DNA, 19 bp, Homo Sapiens
tcgaatcccagcggtgcct

SEQ ID NO: 41348 - DNA, 20 bp, Homo Sapiens
tcgaatcccagcggtgcctc

SEQ ID NO: 41349 - DNA, 21 bp, Homo Sapiens
tcgaatcccagcggtgcctcc

SEQ ID NO: 41350 - DNA, 20 bp, Homo Sapiens
tcgaatcccagtagagcctc

SEQ ID NO: 41351 - DNA, 21 bp, Homo Sapiens
tcgaatcccagtagagcctcc

SEQ ID NO: 41352 - DNA, 20 bp, Homo Sapiens
tcgaatcccatcctcgtcgc

SEQ ID NO: 41353 - DNA, 21 bp, Homo Sapiens
tcgaatcccatcctcgtcgcc

SEQ ID NO: 41354 - DNA, 22 bp, Homo Sapiens
tcgaatcccatcctcgtcgcca

SEQ ID NO: 41355 - DNA, 20 bp, Homo Sapiens
tcgaatcccttcgtggttgc

SEQ ID NO: 41356 - DNA, 21 bp, Homo Sapiens
tcgaatcccttcgtggttgcc

SEQ ID NO: 41357 - DNA, 18 bp, Homo Sapiens
tcgaatccgagtcacggc

SEQ ID NO: 41358 - DNA, 19 bp, Homo Sapiens
tcgaatccgagtcacggca

SEQ ID NO: 41359 - DNA, 20 bp, Homo Sapiens
tcgaatccgagtcacggcac

SEQ ID NO: 41360 - DNA, 21 bp, Homo Sapiens
tcgaatccgagtcacggcacc

SEQ ID NO: 41361 - DNA, 22 bp, Homo Sapiens
tcgaatccgagtcacggcacca

SEQ ID NO: 41362 - DNA, 20 bp, Homo Sapiens
tcgaatccggctcgaaggac

SEQ ID NO: 41363 - DNA, 21 bp, Homo Sapiens
tcgaatccggctcgaaggacc

SEQ ID NO: 41364 - DNA, 20 bp, Homo Sapiens
tcgaatccggctcggaggac

SEQ ID NO: 41365 - DNA, 21 bp, Homo Sapiens
tcgaatccggctcggaggacc

SEQ ID NO: 41366 - DNA, 20 bp, Homo Sapiens
tcgaatcctgccgactacgc

SEQ ID NO: 41367 - DNA, 21 bp, Homo Sapiens
tcgaatcctgccgactacgcc

SEQ ID NO: 41368 - DNA, 22 bp, Homo Sapiens
tcgaatcctgccgactacgcca

SEQ ID NO: 41369 - DNA, 21 bp, Homo Sapiens
tcgaatcctgctcacagcgcc

SEQ ID NO: 41370 - DNA, 20 bp, Homo Sapiens
tcgaatcctgttcgtgacgc

SEQ ID NO: 41371 - DNA, 21 bp, Homo Sapiens
tcgaatcctgttcgtgacgcc

SEQ ID NO: 41372 - DNA, 19 bp, Homo Sapiens
tcgaatctcggtgggacct

SEQ ID NO: 41373 - DNA, 20 bp, Homo Sapiens
tcgaatctcggtgggacctc

SEQ ID NO: 41374 - DNA, 19 bp, Homo Sapiens
tcgactcccggtatgggaa

SEQ ID NO: 41375 - DNA, 20 bp, Homo Sapiens
tcgactcccggtatgggaac

SEQ ID NO: 41376 - DNA, 17 bp, Homo Sapiens
tcgactcccggtgtggg

SEQ ID NO: 41377 - DNA, 18 bp, Homo Sapiens
tcgactcccggtgtggga

SEQ ID NO: 41378 - DNA, 19 bp, Homo Sapiens
tcgactcccggtgtgggaa

SEQ ID NO: 41379 - DNA, 20 bp, Homo Sapiens
tcgactcccggtgtgggaac

SEQ ID NO: 41380 - DNA, 21 bp, Homo Sapiens
tcgactcccggtgtgggaacc

SEQ ID NO: 41381 - DNA, 22 bp, Homo Sapiens
tcgactcccggtgtgggaacca

SEQ ID NO: 41382 - DNA, 16 bp, Homo Sapiens
tcgactcctggctggc

SEQ ID NO: 41383 - DNA, 19 bp, Homo Sapiens
tcgactcctggctggctcg

SEQ ID NO: 41384 - DNA, 20 bp, Homo Sapiens
tcgactcctggctggctcgc

SEQ ID NO: 41385 - DNA, 21 bp, Homo Sapiens
tcgactcctggctggctcgcc

SEQ ID NO: 41386 - DNA, 22 bp, Homo Sapiens
tcgactcctggctggctcgcca

SEQ ID NO: 41387 - DNA, 21 bp, Homo Sapiens
tcgagcccacccagggacgcc

SEQ ID NO: 41388 - DNA, 22 bp, Homo Sapiens
tcgagcccacccagggacgcca

SEQ ID NO: 41389 - DNA, 19 bp, Homo Sapiens
tcgagccccacgttgggcg

SEQ ID NO: 41390 - DNA, 18 bp, Homo Sapiens
tcgagccccagtggaacc

SEQ ID NO: 41391 - DNA, 19 bp, Homo Sapiens
tcgagccccagtggaacca

SEQ ID NO: 41392 - DNA, 20 bp, Homo Sapiens
tcgagccccagtggaaccac

SEQ ID NO: 41393 - DNA, 21 bp, Homo Sapiens
tcgagccccagtggaaccacc

SEQ ID NO: 41394 - DNA, 22 bp, Homo Sapiens
tcgagccccagtggaaccacca

SEQ ID NO: 41395 - DNA, 21 bp, Homo Sapiens
tcgagcctcacacggggcacc

SEQ ID NO: 41396 - DNA, 21 bp, Homo Sapiens
tcgagcctcacctggagcacc

SEQ ID NO: 41397 - DNA, 22 bp, Homo Sapiens
tcgagcctcacctggagcacca

SEQ ID NO: 41398 - DNA, 20 bp, Homo Sapiens
tcgagcctcagagagggcac

SEQ ID NO: 41399 - DNA, 20 bp, Homo Sapiens
tcgagtcccacccggggtac

SEQ ID NO: 41400 - DNA, 21 bp, Homo Sapiens
tcgagtcccatctggggtgcc

SEQ ID NO: 41401 - DNA, 22 bp, Homo Sapiens
tcgagtcccatctggggtgcca

SEQ ID NO: 41402 - DNA, 20 bp, Homo Sapiens
tcgagtcccatctgggtcgc

SEQ ID NO: 41403 - DNA, 21 bp, Homo Sapiens
tcgagtcccatctgggtcgcc

SEQ ID NO: 41404 - DNA, 16 bp, Homo Sapiens
tcgagtcccggcggag

SEQ ID NO: 41405 - DNA, 18 bp, Homo Sapiens
tcgagtcccggcggagtc

SEQ ID NO: 41406 - DNA, 20 bp, Homo Sapiens
tcgagtcccggcggagtcgc

SEQ ID NO: 41407 - DNA, 21 bp, Homo Sapiens
tcgagtcccggcggagtcgcc

SEQ ID NO: 41408 - DNA, 20 bp, Homo Sapiens
tcgagtcccttcgtggtcgc

SEQ ID NO: 41409 - DNA, 21 bp, Homo Sapiens
tcgagtcccttcgtggtcgcc

SEQ ID NO: 41410 - DNA, 22 bp, Homo Sapiens
tcgagtcccttcgtggtcgcca

SEQ ID NO: 41411 - DNA, 20 bp, Homo Sapiens
tcgagtcctgccgcggtcgc

SEQ ID NO: 41412 - DNA, 21 bp, Homo Sapiens
tcgagtcctgccgcggtcgcc

SEQ ID NO: 41413 - DNA, 20 bp, Homo Sapiens
tcgatccccagcatctccac

SEQ ID NO: 41414 - DNA, 21 bp, Homo Sapiens
tcgatccccagcatctccacc

SEQ ID NO: 41415 - DNA, 21 bp, Homo Sapiens
tcgatccccggcacctccacc

SEQ ID NO: 41416 - DNA, 20 bp, Homo Sapiens
tcgatccccggcatctccac

SEQ ID NO: 41417 - DNA, 21 bp, Homo Sapiens
tcgatccccggcatctccacc

SEQ ID NO: 41418 - DNA, 17 bp, Homo Sapiens
tcgatccccgtacgggc

SEQ ID NO: 41419 - DNA, 18 bp, Homo Sapiens
tcgatccccgtacgggcc

SEQ ID NO: 41420 - DNA, 19 bp, Homo Sapiens
tcgatccccgtacgggcca

SEQ ID NO: 41421 - DNA, 20 bp, Homo Sapiens
tcgatccccgtacgggccac

SEQ ID NO: 41422 - DNA, 21 bp, Homo Sapiens
tcgatccccgtacgggccacc

SEQ ID NO: 41423 - DNA, 20 bp, Homo Sapiens
tcgatcccgggcggaaacac

SEQ ID NO: 41424 - DNA, 21 bp, Homo Sapiens
tcgatcccgggcggaaacacc

SEQ ID NO: 41425 - DNA, 20 bp, Homo Sapiens
tcgatcccgggtttcggcac

SEQ ID NO: 41426 - DNA, 21 bp, Homo Sapiens
tcgatgcccgcatcctccacc

SEQ ID NO: 41427 - DNA, 16 bp, Homo Sapiens
tcgatggatcgaaacc

SEQ ID NO: 41428 - DNA, 17 bp, Homo Sapiens
tcgatggatcgaaacca

SEQ ID NO: 41429 - DNA, 25 bp, Homo Sapiens
tcgatggatcgaaaccatcctctgc

SEQ ID NO: 41430 - DNA, 26 bp, Homo Sapiens
tcgatggatcgaaaccatcctctgct

SEQ ID NO: 41431 - DNA, 29 bp, Homo Sapiens
tcgatggatcgaaaccatcctctgctacc

SEQ ID NO: 41432 - DNA, 30 bp, Homo Sapiens; identical to SEQ ID NO: 26204

SEQ ID NO: 41433 - DNA, 16 bp, Homo Sapiens
tcgatggcgtgggttc

SEQ ID NO: 41434 - DNA, 17 bp, Homo Sapiens
tcgatggcgtgggttcg

SEQ ID NO: 41435 - DNA, 24 bp, Homo Sapiens
tcgatggcgtgggttcgaatccca

SEQ ID NO: 41436 - DNA, 30 bp, Homo Sapiens; identical to SEQ ID NO: 26211

SEQ ID NO: 41437 - DNA, 35 bp, Homo Sapiens; identical to SEQ ID NO: 26212

SEQ ID NO: 41438 - DNA, 16 bp, Homo Sapiens
tcgattccccgacggg

SEQ ID NO: 41439 - DNA, 17 bp, Homo Sapiens
tcgattccccgacgggg

SEQ ID NO: 41440 - DNA, 18 bp, Homo Sapiens
tcgattccccgacgggga

SEQ ID NO: 41441 - DNA, 19 bp, Homo Sapiens
tcgattccccgacggggag

SEQ ID NO: 41442 - DNA, 20 bp, Homo Sapiens
tcgattccccgacggggagc

SEQ ID NO: 41443 - DNA, 21 bp, Homo Sapiens
tcgattccccgacggggagcc

SEQ ID NO: 41444 - DNA, 22 bp, Homo Sapiens
tcgattccccgacggggagcca

SEQ ID NO: 41445 - DNA, 20 bp, Homo Sapiens
tcgattcccggccaacgcac

SEQ ID NO: 41446 - DNA, 21 bp, Homo Sapiens
tcgattcccggccaacgcacc

SEQ ID NO: 41447 - DNA, 22 bp, Homo Sapiens
tcgattcccggccaacgcacca

SEQ ID NO: 41448 - DNA, 19 bp, Homo Sapiens
tcgattcccggccaatgca

SEQ ID NO: 41449 - DNA, 20 bp, Homo Sapiens
tcgattcccggccaatgcac

SEQ ID NO: 41450 - DNA, 21 bp, Homo Sapiens
tcgattcccggccaatgcacc

SEQ ID NO: 41451 - DNA, 22 bp, Homo Sapiens
tcgattcccggccaatgcacca

SEQ ID NO: 41452 - DNA, 19 bp, Homo Sapiens
tcgattcccggcccatgca

SEQ ID NO: 41453 - DNA, 20 bp, Homo Sapiens
tcgattcccggcccatgcac

SEQ ID NO: 41454 - DNA, 21 bp, Homo Sapiens
tcgattcccggcccatgcacc

SEQ ID NO: 41455 - DNA, 16 bp, Homo Sapiens
tcgattcccgggcggc

SEQ ID NO: 41456 - DNA, 19 bp, Homo Sapiens
tcgattcccgggcggcgca

SEQ ID NO: 41457 - DNA, 20 bp, Homo Sapiens
tcgattcccgggcggcgcac

SEQ ID NO: 41458 - DNA, 21 bp, Homo Sapiens
tcgattcccgggcggcgcacc

SEQ ID NO: 41459 - DNA, 22 bp, Homo Sapiens
tcgattcccgggcggcgcacca

SEQ ID NO: 41460 - DNA, 17 bp, Homo Sapiens
tcgattcccggtcaggg

SEQ ID NO: 41461 - DNA, 19 bp, Homo Sapiens
tcgattcccggtcagggaa

SEQ ID NO: 41462 - DNA, 20 bp, Homo Sapiens
tcgattcccggtcagggaac

SEQ ID NO: 41463 - DNA, 21 bp, Homo Sapiens
tcgattcccggtcagggaacc

SEQ ID NO: 41464 - DNA, 20 bp, Homo Sapiens
tcgattccggctcgaaggac

SEQ ID NO: 41465 - DNA, 21 bp, Homo Sapiens
tcgattccggctcgaaggacc

SEQ ID NO: 41466 - DNA, 22 bp, Homo Sapiens
tcgattccggctcgaaggacca

SEQ ID NO: 41467 - DNA, 19 bp, Homo Sapiens
tcgattctcatagtcctag

SEQ ID NO: 41468 - DNA, 20 bp, Homo Sapiens
tcgattctcatagtcctagc

SEQ ID NO: 41469 - DNA, 21 bp, Homo Sapiens
tcgattctcatagtcctagcc

SEQ ID NO: 41470 - DNA, 22 bp, Homo Sapiens
tcgattctcatagtcctagcca

SEQ ID NO: 41471 - DNA, 23 bp, Homo Sapiens
tcgcctgccacgcgggaggcccg

SEQ ID NO: 41472 - DNA, 24 bp, Homo Sapiens
tcgcctgccacgcgggaggcccgg

SEQ ID NO: 41473 - DNA, 25 bp, Homo Sapiens
tcgcctgccacgcgggaggcccggg

SEQ ID NO: 41474 - DNA, 26 bp, Homo Sapiens
tcgcctgccacgcgggaggcccgggt

SEQ ID NO: 41475 - DNA, 28 bp, Homo Sapiens
tcgcgagttcaaatctcgctggggcctc

SEQ ID NO: 41476 - DNA, 25 bp, Homo Sapiens
tcgcgggttcgatccccgtacgggc

SEQ ID NO: 41477 - DNA, 26 bp, Homo Sapiens
tcgcgggttcgatccccgtacgggcc

SEQ ID NO: 41478 - DNA, 27 bp, Homo Sapiens
tcgcgggttcgatccccgtacgggcca

SEQ ID NO: 41479 - DNA, 28 bp, Homo Sapiens
tcgcgggttcgatccccgtacgggccac

SEQ ID NO: 41480 - DNA, 29 bp, Homo Sapiens
tcgcgggttcgatccccgtacgggccacc

SEQ ID NO: 41481 - DNA, 28 bp, Homo Sapiens
tcgctggttcgaatccggctcgaaggac

SEQ ID NO: 41482 - DNA, 29 bp, Homo Sapiens
tcgctggttcgaatccggctcgaaggacc

SEQ ID NO: 41483 - DNA, 30 bp, Homo Sapiens; identical to SEQ ID NO: 26303

SEQ ID NO: 41484 - DNA, 28 bp, Homo Sapiens
tcgctggttcgaatccggctcggaggac

SEQ ID NO: 41485 - DNA, 29 bp, Homo Sapiens
tcgctggttcgaatccggctcggaggacc

SEQ ID NO: 41486 - DNA, 29 bp, Homo Sapiens
tcgctggttcgattccagctcgaaggacc

SEQ ID NO: 41487 - DNA, 28 bp, Homo Sapiens
tcgctggttcgattccggctcgaaggac

SEQ ID NO: 41488 - DNA, 29 bp, Homo Sapiens
tcgctggttcgattccggctcgaaggacc

SEQ ID NO: 41489 - DNA, 30 bp, Homo Sapiens; identical to SEQ ID NO: 26315

SEQ ID NO: 41490 - DNA, 19 bp, Homo Sapiens
tcggatcagaagattgcag

SEQ ID NO: 41491 - DNA, 41 bp, Homo Sapiens; identical to SEQ ID NO: 26329

SEQ ID NO: 41492 - DNA, 42 bp, Homo Sapiens; identical to SEQ ID NO: 26330

SEQ ID NO: 41493 - DNA, 16 bp, Homo Sapiens
tcggcgctctcaccgc

SEQ ID NO: 41494 - DNA, 17 bp, Homo Sapiens
tcggcgctctcaccgcc

SEQ ID NO: 41495 - DNA, 26 bp, Homo Sapiens
tcggcgctctcaccgccgcggcccgg

SEQ ID NO: 41496 - DNA, 47 bp, Homo Sapiens
tcggcgctctcaccgccgcggcccgggttcgattcccggtcagggaa

SEQ ID NO: 41497 - DNA, 23 bp, Homo Sapiens
tcggctgttaaccgaaaggttgg

SEQ ID NO: 41498 - DNA, 25 bp, Homo Sapiens
tcggctgttaaccgaaaggttggtg

SEQ ID NO: 41499 - DNA, 26 bp, Homo Sapiens
tcggctgttaaccgaaaggttggtgg

SEQ ID NO: 41500 - DNA, 47 bp, Homo Sapiens
tcggctgttaaccgaaaggttggtggttcgagcccacccagggacgc

SEQ ID NO: 41501 - DNA, 19 bp, Homo Sapiens
tcgggcccataccccgaaa

SEQ ID NO: 41502 - DNA, 31 bp, Homo Sapiens
tcgggggcgtgggttcgaatcccaccgctgc

SEQ ID NO: 41503 - DNA, 17 bp, Homo Sapiens
tcgggtgcgagaggtcc

SEQ ID NO: 41504 - DNA, 18 bp, Homo Sapiens
tcgggtgcgagaggtccc

SEQ ID NO: 41505 - DNA, 19 bp, Homo Sapiens
tcgggtgcgagaggtcccg

SEQ ID NO: 41506 - DNA, 23 bp, Homo Sapiens
tcgggtgcgagaggtcccgggtt

SEQ ID NO: 41507 - DNA, 42 bp, Homo Sapiens
tcgggtgcgagaggtcccgggttcaaatcccggacgagcccc

SEQ ID NO: 41508 - DNA, 17 bp, Homo Sapiens
tcggtagagcatcagac

SEQ ID NO: 41509 - DNA, 18 bp, Homo Sapiens
tcggtagagcatcagact

SEQ ID NO: 41510 - DNA, 25 bp, Homo Sapiens
tcggtagagcatcagacttttaatc

SEQ ID NO: 41511 - DNA, 16 bp, Homo Sapiens
tcggtagagcatgaga

SEQ ID NO: 41512 - DNA, 17 bp, Homo Sapiens
tcggtagagcatgagac

SEQ ID NO: 41513 - DNA, 18 bp, Homo Sapiens
tcggtagagcatgagacc

SEQ ID NO: 41514 - DNA, 19 bp, Homo Sapiens
tcggtagagcatgagaccc

SEQ ID NO: 41515 - DNA, 20 bp, Homo Sapiens
tcggtagagcatgagaccct

SEQ ID NO: 41516 - DNA, 24 bp, Homo Sapiens
tcggtagagcatgagacccttaat

SEQ ID NO: 41517 - DNA, 25 bp, Homo Sapiens
tcggtagagcatgagacccttaatc

SEQ ID NO: 41518 - DNA, 26 bp, Homo Sapiens
tcggtagagcatgagacccttaatct

SEQ ID NO: 41519 - DNA, 27 bp, Homo Sapiens
tcggtagagcatgagacccttaatctc

SEQ ID NO: 41520 - DNA, 18 bp, Homo Sapiens
tcggtagagcatgagact

SEQ ID NO: 41521 - DNA, 19 bp, Homo Sapiens
tcggtagagcatgagactc

SEQ ID NO: 41522 - DNA, 20 bp, Homo Sapiens
tcggtagagcatgagactct

SEQ ID NO: 41523 - DNA, 25 bp, Homo Sapiens
tcggtagagcatgagactcttaatc

SEQ ID NO: 41524 - DNA, 26 bp, Homo Sapiens
tcggtagagcatgagactcttaatct

SEQ ID NO: 41525 - DNA, 27 bp, Homo Sapiens
tcggtagagcatgagactcttaatctc

SEQ ID NO: 41526 - DNA, 37 bp, Homo Sapiens; identical to SEQ ID NO: 26409

SEQ ID NO: 41527 - DNA, 40 bp, Homo Sapiens; identical to SEQ ID NO: 26412

SEQ ID NO: 41528 - DNA, 16 bp, Homo Sapiens
tcggtagagcatggga

SEQ ID NO: 41529 - DNA, 17 bp, Homo Sapiens
tcggtagagcatgggac

SEQ ID NO: 41530 - DNA, 18 bp, Homo Sapiens
tcggtagagcatgggact

SEQ ID NO: 41531 - DNA, 19 bp, Homo Sapiens
tcggtagagcatgggactc

SEQ ID NO: 41532 - DNA, 20 bp, Homo Sapiens
tcggtagagcatgggactct

SEQ ID NO: 41533 - DNA, 24 bp, Homo Sapiens
tcggtagagcatgggactcttaat

SEQ ID NO: 41534 - DNA, 25 bp, Homo Sapiens
tcggtagagcatgggactcttaatc

SEQ ID NO: 41535 - DNA, 26 bp, Homo Sapiens
tcggtagagcatgggactcttaatcc

SEQ ID NO: 41536 - DNA, 27 bp, Homo Sapiens
tcggtagagcatgggactcttaatccc

SEQ ID NO: 41537 - DNA, 37 bp, Homo Sapiens; identical to SEQ ID NO: 26429

SEQ ID NO: 41538 - DNA, 40 bp, Homo Sapiens; identical to SEQ ID NO: 26432

SEQ ID NO: 41539 - DNA, 18 bp, Homo Sapiens
tcggttagcgcgcggtac

SEQ ID NO: 41540 - DNA, 23 bp, Homo Sapiens
tcggttcgaatccgagtcacggc

SEQ ID NO: 41541 - DNA, 24 bp, Homo Sapiens
tcggttcgaatccgagtcacggca

SEQ ID NO: 41542 - DNA, 25 bp, Homo Sapiens
tcggttcgaatccgagtcacggcac

SEQ ID NO: 41543 - DNA, 22 bp, Homo Sapiens
tcgtaaaccgaagatcacgggt

SEQ ID NO: 41544 - DNA, 18 bp, Homo Sapiens
tcgtaaaccgaagatcgc

SEQ ID NO: 41545 - DNA, 19 bp, Homo Sapiens
tcgtaaaccgaagatcgcg

SEQ ID NO: 41546 - DNA, 20 bp, Homo Sapiens
tcgtaaaccgaagatcgcgg

SEQ ID NO: 41547 - DNA, 21 bp, Homo Sapiens
tcgtaaaccgaagatcgcggg

SEQ ID NO: 41548 - DNA, 22 bp, Homo Sapiens
tcgtaaaccgaagatcgcgggt

SEQ ID NO: 41549 - DNA, 23 bp, Homo Sapiens
tcgtaaaccgaagatcgcgggtt

SEQ ID NO: 41550 - DNA, 17 bp, Homo Sapiens
tcgtatagtggttagta

SEQ ID NO: 41551 - DNA, 19 bp, Homo Sapiens
tcgtatagtggttagtact

SEQ ID NO: 41552 - DNA, 20 bp, Homo Sapiens
tcgtatagtggttagtactc

SEQ ID NO: 41553 - DNA, 21 bp, Homo Sapiens
tcgtatagtggttagtactct

SEQ ID NO: 41554 - DNA, 22 bp, Homo Sapiens
tcgtatagtggttagtactctg

SEQ ID NO: 41555 - DNA, 23 bp, Homo Sapiens
tcgtatagtggttagtactctgc

SEQ ID NO: 41556 - DNA, 24 bp, Homo Sapiens
tcgtatagtggttagtactctgcg

SEQ ID NO: 41557 - DNA, 26 bp, Homo Sapiens
tcgtatagtggttagtactctgcgtt

SEQ ID NO: 41558 - DNA, 41 bp, Homo Sapiens; identical to SEQ ID NO: 26478

SEQ ID NO: 41559 - DNA, 42 bp, Homo Sapiens; identical to SEQ ID NO: 26479

SEQ ID NO: 41560 - DNA, 43 bp, Homo Sapiens; identical to SEQ ID NO: 26480

SEQ ID NO: 41561 - DNA, 44 bp, Homo Sapiens; identical to SEQ ID NO: 26481

SEQ ID NO: 41562 - DNA, 46 bp, Homo Sapiens; identical to SEQ ID NO: 26482

SEQ ID NO: 41563 - DNA, 27 bp, Homo Sapiens
tcgtgagttcgatcctcacacggggca

SEQ ID NO: 41564 - DNA, 19 bp, Homo Sapiens
tcgtggccgagtggttaag

SEQ ID NO: 41565 - DNA, 26 bp, Homo Sapiens
tcgtgggttcgagccccacgttgggc

SEQ ID NO: 41566 - DNA, 27 bp, Homo Sapiens
tcgtgggttcgagccccacgttgggcg

SEQ ID NO: 41567 - DNA, 28 bp, Homo Sapiens
tcgtgggttcgagccccacgttgggcgc

SEQ ID NO: 41568 - DNA, 29 bp, Homo Sapiens
tcgtgggttcgagccccacgttgggcgcc

SEQ ID NO: 41569 - DNA, 30 bp, Homo Sapiens; identical to SEQ ID NO: 26498

SEQ ID NO: 41570 - DNA, 16 bp, Homo Sapiens
tcgtggttgtagtccg

SEQ ID NO: 41571 - DNA, 19 bp, Homo Sapiens
tcgtggttgtagtccgtgc

SEQ ID NO: 41572 - DNA, 20 bp, Homo Sapiens
tcgtggttgtagtccgtgcg

SEQ ID NO: 41573 - DNA, 23 bp, Homo Sapiens
tcgtggttgtagtccgtgcgaga

SEQ ID NO: 41574 - DNA, 24 bp, Homo Sapiens
tcgtggttgtagtccgtgcgagaa

SEQ ID NO: 41575 - DNA, 25 bp, Homo Sapiens
tcgtggttgtagtccgtgcgagaat

SEQ ID NO: 41576 - DNA, 26 bp, Homo Sapiens
tcgtggttgtagtccgtgcgagaata

SEQ ID NO: 41577 - DNA, 27 bp, Homo Sapiens
tcgtggttgtagtccgtgcgagaatac

SEQ ID NO: 41578 - DNA, 28 bp, Homo Sapiens
tcgtggttgtagtccgtgcgagaatacc

SEQ ID NO: 41579 - DNA, 29 bp, Homo Sapiens
tcgtggttgtagtccgtgcgagaatacca

SEQ ID NO: 41580 - DNA, 23 bp, Homo Sapiens
tcgttggtctaggggtatgattc

SEQ ID NO: 41581 - DNA, 25 bp, Homo Sapiens
tcgttggtctaggggtatgattctc

SEQ ID NO: 41582 - DNA, 28 bp, Homo Sapiens
tcgttggtctaggggtatgattctcgct

SEQ ID NO: 41583 - DNA, 29 bp, Homo Sapiens
tcgttggtctaggggtatgattctcgctt

SEQ ID NO: 41584 - DNA, 32 bp, Homo Sapiens; identical to SEQ ID NO: 26542

SEQ ID NO: 41585 - DNA, 21 bp, Homo Sapiens
tctaaaccatcctctgctacc

SEQ ID NO: 41586 - DNA, 21 bp, Homo Sapiens
tctaaagacaggggttaggcc

SEQ ID NO: 41587 - DNA, 33 bp, Homo Sapiens
tctaaaggtccctggttcaatcccgggtttcgg

SEQ ID NO: 41588 - DNA, 35 bp, Homo Sapiens
tctaaaggtccctggttcaatcccgggtttcggca

SEQ ID NO: 41589 - DNA, 36 bp, Homo Sapiens
tctaaaggtccctggttcaatcccgggtttcggcac

SEQ ID NO: 41590 - DNA, 37 bp, Homo Sapiens; identical to SEQ ID NO: 26560

SEQ ID NO: 41591 - DNA, 33 bp, Homo Sapiens
tctaaaggtccctggttcgatcccgggtttcgg

SEQ ID NO: 41592 - DNA, 34 bp, Homo Sapiens
tctaaaggtccctggttcgatcccgggtttcggc

SEQ ID NO: 41593 - DNA, 35 bp, Homo Sapiens; identical to SEQ ID NO: 26564

SEQ ID NO: 41594 - DNA, 36 bp, Homo Sapiens; identical to SEQ ID NO: 26565

SEQ ID NO: 41595 - DNA, 37 bp, Homo Sapiens; identical to SEQ ID NO: 26566

SEQ ID NO: 41596 - DNA, 38 bp, Homo Sapiens; identical to SEQ ID NO: 26567

SEQ ID NO: 41597 - DNA, 23 bp, Homo Sapiens
tctaacaacatggctttctcacc

SEQ ID NO: 41598 - DNA, 24 bp, Homo Sapiens
tctaacaacatggctttctcacca

SEQ ID NO: 41599 - DNA, 16 bp, Homo Sapiens
tctaaggcgctgcgtt

SEQ ID NO: 41600 - DNA, 43 bp, Homo Sapiens; identical to SEQ ID NO: 26582

SEQ ID NO: 41601 - DNA, 42 bp, Homo Sapiens; identical to SEQ ID NO: 26585

SEQ ID NO: 41602 - DNA, 42 bp, Homo Sapiens
tctaattcaaaggttgtgggttcgaatcccaccagagtcgcc

SEQ ID NO: 41603 - DNA, 42 bp, Homo Sapiens
tctaattcaaaggttgtgggttcgagtcccaccagagtcgcc

SEQ ID NO: 41604 - DNA, 16 bp, Homo Sapiens
tctagcggttaggatt

SEQ ID NO: 41605 - DNA, 17 bp, Homo Sapiens
tctagcggttaggattc

SEQ ID NO: 41606 - DNA, 18 bp, Homo Sapiens
tctagcggttaggattcc

SEQ ID NO: 41607 - DNA, 19 bp, Homo Sapiens
tctagcggttaggattcct

SEQ ID NO: 41608 - DNA, 20 bp, Homo Sapiens
tctagcggttaggattcctg

SEQ ID NO: 41609 - DNA, 21 bp, Homo Sapiens
tctagcggttaggattcctgg

SEQ ID NO: 41610 - DNA, 22 bp, Homo Sapiens
tctagcggttaggattcctggt

SEQ ID NO: 41611 - DNA, 23 bp, Homo Sapiens
tctagcggttaggattcctggtt

SEQ ID NO: 41612 - DNA, 18 bp, Homo Sapiens
tctaggggtatgattctc

SEQ ID NO: 41613 - DNA, 20 bp, Homo Sapiens
tctaggggtatgattctcgc

SEQ ID NO: 41614 - DNA, 21 bp, Homo Sapiens
tctaggggtatgattctcgct

SEQ ID NO: 41615 - DNA, 22 bp, Homo Sapiens
tctaggggtatgattctcgctt

SEQ ID NO: 41616 - DNA, 22 bp, Homo Sapiens
tctaggggtatgattctcggtt

SEQ ID NO: 41617 - DNA, 25 bp, Homo Sapiens
tctaggttcgactcctggctggctc

SEQ ID NO: 41618 - DNA, 26 bp, Homo Sapiens
tctaggttcgactcctggctggctcg

SEQ ID NO: 41619 - DNA, 27 bp, Homo Sapiens
tctaggttcgactcctggctggctcgc

SEQ ID NO: 41620 - DNA, 28 bp, Homo Sapiens
tctaggttcgactcctggctggctcgcc

SEQ ID NO: 41621 - DNA, 20 bp, Homo Sapiens
tctagtggctaggattcggc

SEQ ID NO: 41622 - DNA, 18 bp, Homo Sapiens
tctagtggtatgattctc

SEQ ID NO: 41623 - DNA, 20 bp, Homo Sapiens
tctagtggtatgattctcgc

SEQ ID NO: 41624 - DNA, 21 bp, Homo Sapiens
tctagtggtatgattctcgct

SEQ ID NO: 41625 - DNA, 22 bp, Homo Sapiens
tctagtggtatgattctcgctt

SEQ ID NO: 41626 - DNA, 18 bp, Homo Sapiens
tctagtggttaggattcg

SEQ ID NO: 41627 - DNA, 20 bp, Homo Sapiens
tctagtggttaggattcggc

SEQ ID NO: 41628 - DNA, 21 bp, Homo Sapiens
tctagtggttaggattcggcg

SEQ ID NO: 41629 - DNA, 22 bp, Homo Sapiens
tctagtggttaggattcggcgc

SEQ ID NO: 41630 - DNA, 23 bp, Homo Sapiens
tctagtggttaggattcggcgct

SEQ ID NO: 41631 - DNA, 24 bp, Homo Sapiens
tctagtggttaggattcggcgctc

SEQ ID NO: 41632 - DNA, 25 bp, Homo Sapiens
tctagtggttaggattcggcgctct

SEQ ID NO: 41633 - DNA, 29 bp, Homo Sapiens
tctagtggttaggattcggcgctctcacc

SEQ ID NO: 41634 - DNA, 30 bp, Homo Sapiens; identical to SEQ ID NO: 26641

SEQ ID NO: 41635 - DNA, 32 bp, Homo Sapiens; identical to SEQ ID NO: 26643

SEQ ID NO: 41636 - DNA, 39 bp, Homo Sapiens; identical to SEQ ID NO: 26644

SEQ ID NO: 41637 - DNA, 17 bp, Homo Sapiens
tctcaccgccgcggccc

SEQ ID NO: 41638 - DNA, 40 bp, Homo Sapiens; identical to SEQ ID NO: 26665

SEQ ID NO: 41639 - DNA, 41 bp, Homo Sapiens; identical to SEQ ID NO: 26666

SEQ ID NO: 41640 - DNA, 42 bp, Homo Sapiens; identical to SEQ ID NO: 26667

SEQ ID NO: 41641 - DNA, 43 bp, Homo Sapiens; identical to SEQ ID NO: 26668

SEQ ID NO: 41642 - DNA, 31 bp, Homo Sapiens; identical to SEQ ID NO: 26674

SEQ ID NO: 41643 - DNA, 33 bp, Homo Sapiens; identical to SEQ ID NO: 26676

SEQ ID NO: 41644 - DNA, 34 bp, Homo Sapiens; identical to SEQ ID NO: 26677

SEQ ID NO: 41645 - DNA, 29 bp, Homo Sapiens
tctcagggtcgtgggttcgagccccacgt

SEQ ID NO: 41646 - DNA, 33 bp, Homo Sapiens; identical to SEQ ID NO: 26682

SEQ ID NO: 41647 - DNA, 35 bp, Homo Sapiens; identical to SEQ ID NO: 26684

SEQ ID NO: 41648 - DNA, 36 bp, Homo Sapiens; identical to SEQ ID NO: 26685

SEQ ID NO: 41649 - DNA, 37 bp, Homo Sapiens; identical to SEQ ID NO: 26686

SEQ ID NO: 41650 - DNA, 38 bp, Homo Sapiens; identical to SEQ ID NO: 26687

SEQ ID NO: 41651 - DNA, 21 bp, Homo Sapiens
tctcataatctgaaggtcctg

SEQ ID NO: 41652 - DNA, 16 bp, Homo Sapiens
tctcatagtcctagcc

SEQ ID NO: 41653 - DNA, 39 bp, Homo Sapiens; identical to SEQ ID NO: 26705

SEQ ID NO: 41654 - DNA, 40 bp, Homo Sapiens
tctccaatggaggcgtgggttcgaatcccacttctgacac

SEQ ID NO: 41655 - DNA, 40 bp, Homo Sapiens
tctccggatggaggcgtgggttcgaatcccacttctgaca

SEQ ID NO: 41656 - DNA, 41 bp, Homo Sapiens; identical to SEQ ID NO: 26727

SEQ ID NO: 41657 - DNA, 42 bp, Homo Sapiens; identical to SEQ ID NO: 26728

SEQ ID NO: 41658 - DNA, 26 bp, Homo Sapiens
tctcgcctcccacgcgggagacccgg

SEQ ID NO: 41659 - DNA, 26 bp, Homo Sapiens
tctcgcctgccacgcgggaggcccgg

SEQ ID NO: 41660 - DNA, 16 bp, Homo Sapiens
tctcgctggggcctcc

SEQ ID NO: 41661 - DNA, 17 bp, Homo Sapiens
tctcgctggggcctcca

SEQ ID NO: 41662 - DNA, 16 bp, Homo Sapiens
tctcggtggaacctcc

SEQ ID NO: 41663 - DNA, 17 bp, Homo Sapiens
tctcggtggaacctcca

SEQ ID NO: 41664 - DNA, 16 bp, Homo Sapiens
tctcggtgggacctcc

SEQ ID NO: 41665 - DNA, 17 bp, Homo Sapiens
tctcggtgggacctcca

SEQ ID NO: 41666 - DNA, 16 bp, Homo Sapiens
tctctgtggaacctcc

SEQ ID NO: 41667 - DNA, 19 bp, Homo Sapiens
tctcttcgggggcgtgggt

SEQ ID NO: 41668 - DNA, 40 bp, Homo Sapiens; identical to SEQ ID NO: 26752

SEQ ID NO: 41669 - DNA, 16 bp, Homo Sapiens
tctgaaggtcctgagt

SEQ ID NO: 41670 - DNA, 17 bp, Homo Sapiens
tctgaaggtcctgagtt

SEQ ID NO: 41671 - DNA, 18 bp, Homo Sapiens
tctgaaggtcctgagttc

SEQ ID NO: 41672 - DNA, 19 bp, Homo Sapiens
tctgaaggtcctgagttcg

SEQ ID NO: 41673 - DNA, 35 bp, Homo Sapiens; identical to SEQ ID NO: 26765

SEQ ID NO: 41674 - DNA, 36 bp, Homo Sapiens; identical to SEQ ID NO: 26766

SEQ ID NO: 41675 - DNA, 37 bp, Homo Sapiens; identical to SEQ ID NO: 26767

SEQ ID NO: 41676 - DNA, 38 bp, Homo Sapiens; identical to SEQ ID NO: 26768

SEQ ID NO: 41677 - DNA, 35 bp, Homo Sapiens; identical to SEQ ID NO: 26772

SEQ ID NO: 41678 - DNA, 36 bp, Homo Sapiens; identical to SEQ ID NO: 26773

SEQ ID NO: 41679 - DNA, 37 bp, Homo Sapiens; identical to SEQ ID NO: 26774

SEQ ID NO: 41680 - DNA, 38 bp, Homo Sapiens; identical to SEQ ID NO: 26775

SEQ ID NO: 41681 - DNA, 16 bp, Homo Sapiens
tctgaaggtcgtgagt

SEQ ID NO: 41682 - DNA, 19 bp, Homo Sapiens
tctgaaggtcgtgagttcg

SEQ ID NO: 41683 - DNA, 32 bp, Homo Sapiens; identical to SEQ ID NO: 26787

SEQ ID NO: 41684 - DNA, 33 bp, Homo Sapiens; identical to SEQ ID NO: 26788

SEQ ID NO: 41685 - DNA, 35 bp, Homo Sapiens; identical to SEQ ID NO: 26790

SEQ ID NO: 41686 - DNA, 36 bp, Homo Sapiens; identical to SEQ ID NO: 26791

SEQ ID NO: 41687 - DNA, 37 bp, Homo Sapiens; identical to SEQ ID NO: 26792

SEQ ID NO: 41688 - DNA, 38 bp, Homo Sapiens; identical to SEQ ID NO: 26793

SEQ ID NO: 41689 - DNA, 32 bp, Homo Sapiens; identical to SEQ ID NO: 26794

SEQ ID NO: 41690 - DNA, 33 bp, Homo Sapiens; identical to SEQ ID NO: 26795

SEQ ID NO: 41691 - DNA, 35 bp, Homo Sapiens; identical to SEQ ID NO: 26797

SEQ ID NO: 41692 - DNA, 36 bp, Homo Sapiens; identical to SEQ ID NO: 26798

SEQ ID NO: 41693 - DNA, 37 bp, Homo Sapiens; identical to SEQ ID NO: 26799

SEQ ID NO: 41694 - DNA, 38 bp, Homo Sapiens; identical to SEQ ID NO: 26800

SEQ ID NO: 41695 - DNA, 17 bp, Homo Sapiens
tctgaatccagcgatcc

SEQ ID NO: 41696 - DNA, 18 bp, Homo Sapiens
tctgaatccagcgatccg

SEQ ID NO: 41697 - DNA, 19 bp, Homo Sapiens
tctgaatccagcgatccga

SEQ ID NO: 41698 - DNA, 20 bp, Homo Sapiens
tctgaatccagcgatccgag

SEQ ID NO: 41699 - DNA, 21 bp, Homo Sapiens
tctgaatccagcgatccgagt

SEQ ID NO: 41700 - DNA, 22 bp, Homo Sapiens
tctgaatccagcgatccgagtt

SEQ ID NO: 41701 - DNA, 23 bp, Homo Sapiens
tctgaatccagcgatccgagttc

SEQ ID NO: 41702 - DNA, 36 bp, Homo Sapiens; identical to SEQ ID NO: 26814

SEQ ID NO: 41703 - DNA, 40 bp, Homo Sapiens; identical to SEQ ID NO: 26818

SEQ ID NO: 41704 - DNA, 41 bp, Homo Sapiens; identical to SEQ ID NO: 26819

SEQ ID NO: 41705 - DNA, 42 bp, Homo Sapiens; identical to SEQ ID NO: 26820

SEQ ID NO: 41706 - DNA, 35 bp, Homo Sapiens; identical to SEQ ID NO: 26852

SEQ ID NO: 41707 - DNA, 36 bp, Homo Sapiens; identical to SEQ ID NO: 26853

SEQ ID NO: 41708 - DNA, 37 bp, Homo Sapiens; identical to SEQ ID NO: 26854

SEQ ID NO: 41709 - DNA, 18 bp, Homo Sapiens
tctgagggtccagggttc

SEQ ID NO: 41710 - DNA, 19 bp, Homo Sapiens
tctgagggtccagggttca

SEQ ID NO: 41711 - DNA, 36 bp, Homo Sapiens; identical to SEQ ID NO: 26864

SEQ ID NO: 41712 - DNA, 37 bp, Homo Sapiens; identical to SEQ ID NO: 26865

SEQ ID NO: 41713 - DNA, 38 bp, Homo Sapiens; identical to SEQ ID NO: 26866

SEQ ID NO: 41714 - DNA, 36 bp, Homo Sapiens; identical to SEQ ID NO: 26869

SEQ ID NO: 41715 - DNA, 37 bp, Homo Sapiens; identical to SEQ ID NO: 26870

SEQ ID NO: 41716 - DNA, 36 bp, Homo Sapiens; identical to SEQ ID NO: 26872

SEQ ID NO: 41717 - DNA, 37 bp, Homo Sapiens; identical to SEQ ID NO: 26873

SEQ ID NO: 41718 - DNA, 38 bp, Homo Sapiens; identical to SEQ ID NO: 26874

SEQ ID NO: 41719 - DNA, 31 bp, Homo Sapiens; identical to SEQ ID NO: 26875

SEQ ID NO: 41720 - DNA, 32 bp, Homo Sapiens; identical to SEQ ID NO: 26876

SEQ ID NO: 41721 - DNA, 33 bp, Homo Sapiens; identical to SEQ ID NO: 26877

SEQ ID NO: 41722 - DNA, 34 bp, Homo Sapiens; identical to SEQ ID NO: 26878

SEQ ID NO: 41723 - DNA, 35 bp, Homo Sapiens; identical to SEQ ID NO: 26879

SEQ ID NO: 41724 - DNA, 36 bp, Homo Sapiens; identical to SEQ ID NO: 26880

SEQ ID NO: 41725 - DNA, 37 bp, Homo Sapiens; identical to SEQ ID NO: 26881

SEQ ID NO: 41726 - DNA, 38 bp, Homo Sapiens; identical to SEQ ID NO: 26882

SEQ ID NO: 41727 - DNA, 36 bp, Homo Sapiens
tctgagggtccggggttcaagtccctgttcgggcgc

SEQ ID NO: 41728 - DNA, 37 bp, Homo Sapiens; identical to SEQ ID NO: 26889

SEQ ID NO: 41729 - DNA, 38 bp, Homo Sapiens; identical to SEQ ID NO: 26890

SEQ ID NO: 41730 - DNA, 16 bp, Homo Sapiens
tctgcgttgtggccgc

SEQ ID NO: 41731 - DNA, 16 bp, Homo Sapiens
tctggactctgaatcc

SEQ ID NO: 41732 - DNA, 17 bp, Homo Sapiens
tctggactctgaatcca

SEQ ID NO: 41733 - DNA, 19 bp, Homo Sapiens
tctggactctgaatccagc

SEQ ID NO: 41734 - DNA, 20 bp, Homo Sapiens
tctggactctgaatccagcg

SEQ ID NO: 41735 - DNA, 22 bp, Homo Sapiens
tctggactctgaatccagcgat

SEQ ID NO: 41736 - DNA, 23 bp, Homo Sapiens
tctggactctgaatccagcgatc

SEQ ID NO: 41737 - DNA, 24 bp, Homo Sapiens
tctggactctgaatccagcgatcc

SEQ ID NO: 41738 - DNA, 25 bp, Homo Sapiens
tctggactctgaatccagcgatccg

SEQ ID NO: 41739 - DNA, 26 bp, Homo Sapiens
tctggactctgaatccagcgatccga

SEQ ID NO: 41740 - DNA, 27 bp, Homo Sapiens
tctggactctgaatccagcgatccgag

SEQ ID NO: 41741 - DNA, 28 bp, Homo Sapiens
tctggactctgaatccagcgatccgagt

SEQ ID NO: 41742 - DNA, 29 bp, Homo Sapiens
tctggactctgaatccagcgatccgagtt

SEQ ID NO: 41743 - DNA, 30 bp, Homo Sapiens; identical to SEQ ID NO: 26910

SEQ ID NO: 41744 - DNA, 31 bp, Homo Sapiens; identical to SEQ ID NO: 26911

SEQ ID NO: 41745 - DNA, 47 bp, Homo Sapiens; identical to SEQ ID NO: 26914

SEQ ID NO: 41746 - DNA, 16 bp, Homo Sapiens
tctggactttgaatcc

SEQ ID NO: 41747 - DNA, 20 bp, Homo Sapiens
tctggtctccaatggaggcg

SEQ ID NO: 41748 - DNA, 44 bp, Homo Sapiens
tctggtctccaatggaggcgtgggttcgaatcccacttctgaca

SEQ ID NO: 41749 - DNA, 45 bp, Homo Sapiens
tctggtctccaatggaggcgtgggttcgaatcccacttctgacac

SEQ ID NO: 41750 - DNA, 46 bp, Homo Sapiens; identical to SEQ ID NO: 26920

SEQ ID NO: 41751 - DNA, 21 bp, Homo Sapiens
tctggtctccggatggaggcg

SEQ ID NO: 41752 - DNA, 45 bp, Homo Sapiens
tctggtctccggatggaggcgtgggttcgaatcccacttctgaca

SEQ ID NO: 41753 - DNA, 46 bp, Homo Sapiens; identical to SEQ ID NO: 26924

SEQ ID NO: 41754 - DNA, 47 bp, Homo Sapiens; identical to SEQ ID NO: 26925

SEQ ID NO: 41755 - DNA, 30 bp, Homo Sapiens; identical to SEQ ID NO: 26928

SEQ ID NO: 41756 - DNA, 17 bp, Homo Sapiens
tctgtggcgcaatggac

SEQ ID NO: 41757 - DNA, 16 bp, Homo Sapiens
tcttaatcccagggtc

SEQ ID NO: 41758 - DNA, 17 bp, Homo Sapiens
tcttaatcccagggtcg

SEQ ID NO: 41759 - DNA, 18 bp, Homo Sapiens
tcttaatcccagggtcgt

SEQ ID NO: 41760 - DNA, 19 bp, Homo Sapiens
tcttaatcccagggtcgtg

SEQ ID NO: 41761 - DNA, 20 bp, Homo Sapiens
tcttaatcccagggtcgtgg

SEQ ID NO: 41762 - DNA, 37 bp, Homo Sapiens; identical to SEQ ID NO: 26946

SEQ ID NO: 41763 - DNA, 16 bp, Homo Sapiens
tcttaatctcagggtc

SEQ ID NO: 41764 - DNA, 17 bp, Homo Sapiens
tcttaatctcagggtcg

SEQ ID NO: 41765 - DNA, 18 bp, Homo Sapiens
tcttaatctcagggtcgt

SEQ ID NO: 41766 - DNA, 19 bp, Homo Sapiens
tcttaatctcagggtcgtg

SEQ ID NO: 41767 - DNA, 31 bp, Homo Sapiens; identical to SEQ ID NO: 26956

SEQ ID NO: 41768 - DNA, 43 bp, Homo Sapiens; identical to SEQ ID NO: 26961

SEQ ID NO: 41769 - DNA, 35 bp, Homo Sapiens; identical to SEQ ID NO: 26971

SEQ ID NO: 41770 - DNA, 38 bp, Homo Sapiens; identical to SEQ ID NO: 26986

SEQ ID NO: 41771 - DNA, 17 bp, Homo Sapiens
tcttcgggggcgtgggt

SEQ ID NO: 41772 - DNA, 18 bp, Homo Sapiens
tcttcgggggcgtgggtt

SEQ ID NO: 41773 - DNA, 38 bp, Homo Sapiens; identical to SEQ ID NO: 26993

SEQ ID NO: 41774 - DNA, 16 bp, Homo Sapiens
tcttgcgacccgggtt

SEQ ID NO: 41775 - DNA, 17 bp, Homo Sapiens
tcttgcgacccgggttc

SEQ ID NO: 41776 - DNA, 30 bp, Homo Sapiens; identical to SEQ ID NO: 26998

SEQ ID NO: 41777 - DNA, 31 bp, Homo Sapiens; identical to SEQ ID NO: 26999

SEQ ID NO: 41778 - DNA, 32 bp, Homo Sapiens; identical to SEQ ID NO: 27000

SEQ ID NO: 41779 - DNA, 33 bp, Homo Sapiens; identical to SEQ ID NO: 27001

SEQ ID NO: 41780 - DNA, 34 bp, Homo Sapiens; identical to SEQ ID NO: 27002

SEQ ID NO: 41781 - DNA, 35 bp, Homo Sapiens; identical to SEQ ID NO: 27003

SEQ ID NO: 41782 - DNA, 36 bp, Homo Sapiens; identical to SEQ ID NO: 27004

SEQ ID NO: 41783 - DNA, 19 bp, Homo Sapiens
tgaaaaagtcatggaggcc

SEQ ID NO: 41784 - DNA, 18 bp, Homo Sapiens
tgaaaacctttttccaag

SEQ ID NO: 41785 - DNA, 20 bp, Homo Sapiens
tgaaaacctttttccaagga

SEQ ID NO: 41786 - DNA, 21 bp, Homo Sapiens
tgaaaacctttttccaaggac

SEQ ID NO: 41787 - DNA, 22 bp, Homo Sapiens
tgaaaacctttttccaaggaca

SEQ ID NO: 41788 - DNA, 23 bp, Homo Sapiens
tgaaaacctttttccaaggacac

SEQ ID NO: 41789 - DNA, 24 bp, Homo Sapiens
tgaaaacctttttccaaggacacc

SEQ ID NO: 41790 - DNA, 25 bp, Homo Sapiens
tgaaaacctttttccaaggacacca

SEQ ID NO: 41791 - DNA, 20 bp, Homo Sapiens
tgaaaatgtttagacgggct

SEQ ID NO: 41792 - DNA, 21 bp, Homo Sapiens
tgaaaatgtttagacgggctc

SEQ ID NO: 41793 - DNA, 36 bp, Homo Sapiens; identical to SEQ ID NO: 27051

SEQ ID NO: 41794 - DNA, 18 bp, Homo Sapiens
tgaagatctaaaggtccc

SEQ ID NO: 41795 - DNA, 16 bp, Homo Sapiens
tgaagcattggactgt

SEQ ID NO: 41796 - DNA, 17 bp, Homo Sapiens
tgaagcattggactgta

SEQ ID NO: 41797 - DNA, 16 bp, Homo Sapiens
tgaaggtcctgagttc

SEQ ID NO: 41798 - DNA, 33 bp, Homo Sapiens; identical to SEQ ID NO: 27088

SEQ ID NO: 41799 - DNA, 34 bp, Homo Sapiens; identical to SEQ ID NO: 27089

SEQ ID NO: 41800 - DNA, 35 bp, Homo Sapiens; identical to SEQ ID NO: 27090

SEQ ID NO: 41801 - DNA, 33 bp, Homo Sapiens; identical to SEQ ID NO: 27092

SEQ ID NO: 41802 - DNA, 34 bp, Homo Sapiens; identical to SEQ ID NO: 27093

SEQ ID NO: 41803 - DNA, 35 bp, Homo Sapiens; identical to SEQ ID NO: 27094

SEQ ID NO: 41804 - DNA, 16 bp, Homo Sapiens
tgaaggtcgtgagttc

SEQ ID NO: 41805 - DNA, 17 bp, Homo Sapiens
tgaaggtcgtgagttcg

SEQ ID NO: 41806 - DNA, 34 bp, Homo Sapiens; identical to SEQ ID NO: 27101

SEQ ID NO: 41807 - DNA, 35 bp, Homo Sapiens; identical to SEQ ID NO: 27102

SEQ ID NO: 41808 - DNA, 32 bp, Homo Sapiens; identical to SEQ ID NO: 27107

SEQ ID NO: 41809 - DNA, 34 bp, Homo Sapiens; identical to SEQ ID NO: 27109

SEQ ID NO: 41810 - DNA, 35 bp, Homo Sapiens; identical to SEQ ID NO: 27110

SEQ ID NO: 41811 - DNA, 16 bp, Homo Sapiens
tgaatccagcgatccg

SEQ ID NO: 41812 - DNA, 17 bp, Homo Sapiens
tgaatccagcgatccga

SEQ ID NO: 41813 - DNA, 18 bp, Homo Sapiens
tgaatccagcgatccgag

SEQ ID NO: 41814 - DNA, 19 bp, Homo Sapiens
tgaatccagcgatccgagt

SEQ ID NO: 41815 - DNA, 20 bp, Homo Sapiens
tgaatccagcgatccgagtt

SEQ ID NO: 41816 - DNA, 21 bp, Homo Sapiens
tgaatccagcgatccgagttc

SEQ ID NO: 41817 - DNA, 22 bp, Homo Sapiens
tgaatccagcgatccgagttca

SEQ ID NO: 41818 - DNA, 21 bp, Homo Sapiens
tgaatctgacaacagaggctt

SEQ ID NO: 41819 - DNA, 27 bp, Homo Sapiens
tgaatctgacaacagaggcttacgacc

SEQ ID NO: 41820 - DNA, 28 bp, Homo Sapiens
tgaatctgacaacagaggcttacgaccc

SEQ ID NO: 41821 - DNA, 29 bp, Homo Sapiens
tgaatctgacaacagaggcttacgacccc

SEQ ID NO: 41822 - DNA, 30 bp, Homo Sapiens; identical to SEQ ID NO: 27160

SEQ ID NO: 41823 - DNA, 31 bp, Homo Sapiens; identical to SEQ ID NO: 27161

SEQ ID NO: 41824 - DNA, 32 bp, Homo Sapiens; identical to SEQ ID NO: 27162

SEQ ID NO: 41825 - DNA, 33 bp, Homo Sapiens; identical to SEQ ID NO: 27163

SEQ ID NO: 41826 - DNA, 34 bp, Homo Sapiens; identical to SEQ ID NO: 27164

SEQ ID NO: 41827 - DNA, 35 bp, Homo Sapiens; identical to SEQ ID NO: 27165

SEQ ID NO: 41828 - DNA, 36 bp, Homo Sapiens; identical to SEQ ID NO: 27166

SEQ ID NO: 41829 - DNA, 37 bp, Homo Sapiens; identical to SEQ ID NO: 27167

SEQ ID NO: 41830 - DNA, 38 bp, Homo Sapiens; identical to SEQ ID NO: 27168

SEQ ID NO: 41831 - DNA, 39 bp, Homo Sapiens; identical to SEQ ID NO: 27169

SEQ ID NO: 41832 - DNA, 40 bp, Homo Sapiens; identical to SEQ ID NO: 27170

SEQ ID NO: 41833 - DNA, 41 bp, Homo Sapiens; identical to SEQ ID NO: 27171

SEQ ID NO: 41834 - DNA, 43 bp, Homo Sapiens; identical to SEQ ID NO: 27176

SEQ ID NO: 41835 - DNA, 34 bp, Homo Sapiens; identical to SEQ ID NO: 27197

SEQ ID NO: 41836 - DNA, 35 bp, Homo Sapiens; identical to SEQ ID NO: 27198

SEQ ID NO: 41837 - DNA, 30 bp, Homo Sapiens
tgacccgggttcgattcccggccaacgcac

SEQ ID NO: 41838 - DNA, 31 bp, Homo Sapiens; identical to SEQ ID NO: 27207

SEQ ID NO: 41839 - DNA, 20 bp, Homo Sapiens
tgactccagatcagaaggct

SEQ ID NO: 41840 - DNA, 22 bp, Homo Sapiens
tgactccagatcagaaggctgc

SEQ ID NO: 41841 - DNA, 23 bp, Homo Sapiens
tgactccagatcagaaggctgcg

SEQ ID NO: 41842 - DNA, 27 bp, Homo Sapiens
tgactccagatcagaaggctgcgtgtt

SEQ ID NO: 41843 - DNA, 28 bp, Homo Sapiens
tgactccagatcagaaggctgcgtgttc

SEQ ID NO: 41844 - DNA, 22 bp, Homo Sapiens
tgactccagatcagaaggttgc

SEQ ID NO: 41845 - DNA, 21 bp, Homo Sapiens
tgactgcagatcaagaggtcc

SEQ ID NO: 41846 - DNA, 22 bp, Homo Sapiens
tgactgcagatcaagaggtccc

SEQ ID NO: 41847 - DNA, 23 bp, Homo Sapiens
tgactgcagatcaagaggtcccc

SEQ ID NO: 41848 - DNA, 24 bp, Homo Sapiens
tgactgcagatcaagaggtccccg

SEQ ID NO: 41849 - DNA, 23 bp, Homo Sapiens
tgactgcagatcaagaggtccct

SEQ ID NO: 41850 - DNA, 24 bp, Homo Sapiens
tgactgcagatcaagaggtccctg

SEQ ID NO: 41851 - DNA, 17 bp, Homo Sapiens
tgagcactctggactct

SEQ ID NO: 41852 - DNA, 22 bp, Homo Sapiens
tgagcactctggactctgaatc

SEQ ID NO: 41853 - DNA, 24 bp, Homo Sapiens
tgagcactctggactctgaatcca

SEQ ID NO: 41854 - DNA, 25 bp, Homo Sapiens
tgagcactctggactctgaatccag

SEQ ID NO: 41855 - DNA, 26 bp, Homo Sapiens
tgagcactctggactctgaatccagc

SEQ ID NO: 41856 - DNA, 34 bp, Homo Sapiens; identical to SEQ ID NO: 27237

SEQ ID NO: 41857 - DNA, 33 bp, Homo Sapiens; identical to SEQ ID NO: 27242

SEQ ID NO: 41858 - DNA, 34 bp, Homo Sapiens; identical to SEQ ID NO: 27256

SEQ ID NO: 41859 - DNA, 16 bp, Homo Sapiens
tgagggtccagggttc

SEQ ID NO: 41860 - DNA, 32 bp, Homo Sapiens; identical to SEQ ID NO: 27268

SEQ ID NO: 41861 - DNA, 33 bp, Homo Sapiens; identical to SEQ ID NO: 27269

SEQ ID NO: 41862 - DNA, 34 bp, Homo Sapiens; identical to SEQ ID NO: 27270

SEQ ID NO: 41863 - DNA, 35 bp, Homo Sapiens; identical to SEQ ID NO: 27271

SEQ ID NO: 41864 - DNA, 36 bp, Homo Sapiens; identical to SEQ ID NO: 27272

SEQ ID NO: 41865 - DNA, 26 bp, Homo Sapiens
tgagggttcgaatcccttcgtggttg

SEQ ID NO: 41866 - DNA, 27 bp, Homo Sapiens
tgagggttcgaatcccttcgtggttgc

SEQ ID NO: 41867 - DNA, 28 bp, Homo Sapiens
tgagggttcgaatcccttcgtggttgcc

SEQ ID NO: 41868 - DNA, 26 bp, Homo Sapiens
tgagggttcgagtcccttcgtggtcg

SEQ ID NO: 41869 - DNA, 27 bp, Homo Sapiens
tgagggttcgagtcccttcgtggtcgc

SEQ ID NO: 41870 - DNA, 28 bp, Homo Sapiens
tgagggttcgagtcccttcgtggtcgcc

SEQ ID NO: 41871 - DNA, 29 bp, Homo Sapiens
tgagggttcgagtcccttcgtggtcgcca

SEQ ID NO: 41872 - DNA, 34 bp, Homo Sapiens; identical to SEQ ID NO: 27286

SEQ ID NO: 41873 - DNA, 17 bp, Homo Sapiens
tgagtgaagcattggac

SEQ ID NO: 41874 - DNA, 18 bp, Homo Sapiens
tgagtgaagcattggact

SEQ ID NO: 41875 - DNA, 21 bp, Homo Sapiens
tgagtgaagcattggactgta

SEQ ID NO: 41876 - DNA, 23 bp, Homo Sapiens
tgagttcgaacctcagagggggc

SEQ ID NO: 41877 - DNA, 24 bp, Homo Sapiens
tgagttcgaacctcagagggggca

SEQ ID NO: 41878 - DNA, 25 bp, Homo Sapiens
tgagttcgaacctcagagggggcac

SEQ ID NO: 41879 - DNA, 27 bp, Homo Sapiens
tgatcgtatagtggttagtactctgcg

SEQ ID NO: 41880 - DNA, 28 bp, Homo Sapiens
tgatcgtatagtggttagtactctgcgt

SEQ ID NO: 41881 - DNA, 22 bp, Homo Sapiens
tgattccggatcagaagattga

SEQ ID NO: 41882 - DNA, 26 bp, Homo Sapiens
tgattccggatcagaagattgagggt

SEQ ID NO: 41883 - DNA, 28 bp, Homo Sapiens
tgattccggatcagaagattgagggttc

SEQ ID NO: 41884 - DNA, 29 bp, Homo Sapiens
tgattccggatcagaagattgagggttcg

SEQ ID NO: 41885 - DNA, 36 bp, Homo Sapiens
tgattccggatcagaagattgagggttcgagtccct

SEQ ID NO: 41886 - DNA, 19 bp, Homo Sapiens
tgattctcgcttcgggtgc

SEQ ID NO: 41887 - DNA, 20 bp, Homo Sapiens
tgattctcgcttcgggtgcg

SEQ ID NO: 41888 - DNA, 19 bp, Homo Sapiens
tgattctcgctttgggtgc

SEQ ID NO: 41889 - DNA, 19 bp, Homo Sapiens
tgattctcggtttgggtcc

SEQ ID NO: 41890 - DNA, 20 bp, Homo Sapiens
tgattctcggtttgggtccg

SEQ ID NO: 41891 - DNA, 21 bp, Homo Sapiens
tgattctcggtttgggtccga

SEQ ID NO: 41892 - DNA, 20 bp, Homo Sapiens
tgcaaattcgaagaagcagc

SEQ ID NO: 41893 - DNA, 30 bp, Homo Sapiens; identical to SEQ ID NO: 27440

SEQ ID NO: 41894 - DNA, 36 bp, Homo Sapiens; identical to SEQ ID NO: 27441

SEQ ID NO: 41895 - DNA, 38 bp, Homo Sapiens; identical to SEQ ID NO: 27443

SEQ ID NO: 41896 - DNA, 39 bp, Homo Sapiens; identical to SEQ ID NO: 27444

SEQ ID NO: 41897 - DNA, 42 bp, Homo Sapiens; identical to SEQ ID NO: 27447

SEQ ID NO: 41898 - DNA, 20 bp, Homo Sapiens
tgcaatacttaatttctgcc

SEQ ID NO: 41899 - DNA, 21 bp, Homo Sapiens
tgcaatacttaatttctgcca

SEQ ID NO: 41900 - DNA, 33 bp, Homo Sapiens; identical to SEQ ID NO: 27461

SEQ ID NO: 41901 - DNA, 34 bp, Homo Sapiens; identical to SEQ ID NO: 27462

SEQ ID NO: 41902 - DNA, 33 bp, Homo Sapiens; identical to SEQ ID NO: 27467

SEQ ID NO: 41903 - DNA, 36 bp, Homo Sapiens
tgcacgaggccccgggttcaatccccggcacctcca

SEQ ID NO: 41904 - DNA, 37 bp, Homo Sapiens; identical to SEQ ID NO: 27470

SEQ ID NO: 41905 - DNA, 38 bp, Homo Sapiens; identical to SEQ ID NO: 27471

SEQ ID NO: 41906 - DNA, 33 bp, Homo Sapiens; identical to SEQ ID NO: 27481

SEQ ID NO: 41907 - DNA, 34 bp, Homo Sapiens; identical to SEQ ID NO: 27482

SEQ ID NO: 41908 - DNA, 42 bp, Homo Sapiens
tgcacgtatgaggccccgggttcaatccccggcatctccacc

SEQ ID NO: 41909 - DNA, 29 bp, Homo Sapiens
tgcagagtggggttttgcagtccttacca

SEQ ID NO: 41910 - DNA, 26 bp, Homo Sapiens
tgcaggttcgagtcctgccgcggtcg

SEQ ID NO: 41911 - DNA, 27 bp, Homo Sapiens
tgcaggttcgagtcctgccgcggtcgc

SEQ ID NO: 41912 - DNA, 28 bp, Homo Sapiens
tgcaggttcgagtcctgccgcggtcgcc

SEQ ID NO: 41913 - DNA, 20 bp, Homo Sapiens
tgcagtggtagaattctcgc

SEQ ID NO: 41914 - DNA, 21 bp, Homo Sapiens
tgcagtggtagaattctcgcc

SEQ ID NO: 41915 - DNA, 22 bp, Homo Sapiens
tgcagtggtagaattctcgcct

SEQ ID NO: 41916 - DNA, 36 bp, Homo Sapiens; identical to SEQ ID NO: 27494

SEQ ID NO: 41917 - DNA, 37 bp, Homo Sapiens; identical to SEQ ID NO: 27495

SEQ ID NO: 41918 - DNA, 38 bp, Homo Sapiens; identical to SEQ ID NO: 27496

SEQ ID NO: 41919 - DNA, 31 bp, Homo Sapiens
tgcattggtggttcagtggtagaattctcgc

SEQ ID NO: 41920 - DNA, 32 bp, Homo Sapiens
tgcattggtggttcagtggtagaattctcgcc

SEQ ID NO: 41921 - DNA, 33 bp, Homo Sapiens; identical to SEQ ID NO: 27500

SEQ ID NO: 41922 - DNA, 18 bp, Homo Sapiens
tgccacgcgggaggcccg

SEQ ID NO: 41923 - DNA, 21 bp, Homo Sapiens
tgccacgcgggaggcccgggt

SEQ ID NO: 41924 - DNA, 20 bp, Homo Sapiens
tgcccccatgtctaacaaca

SEQ ID NO: 41925 - DNA, 24 bp, Homo Sapiens
tgcccccatgtctaacaacatggc

SEQ ID NO: 41926 - DNA, 25 bp, Homo Sapiens
tgcccccatgtctaacaacatggct

SEQ ID NO: 41927 - DNA, 26 bp, Homo Sapiens
tgcccccatgtctaacaacatggctt

SEQ ID NO: 41928 - DNA, 31 bp, Homo Sapiens; identical to SEQ ID NO: 27530

SEQ ID NO: 41929 - DNA, 33 bp, Homo Sapiens; identical to SEQ ID NO: 27532

SEQ ID NO: 41930 - DNA, 34 bp, Homo Sapiens; identical to SEQ ID NO: 27533

SEQ ID NO: 41931 - DNA, 16 bp, Homo Sapiens
tgcccgcatcctccac

SEQ ID NO: 41932 - DNA, 17 bp, Homo Sapiens
tgcccgcatcctccacc

SEQ ID NO: 41933 - DNA, 16 bp, Homo Sapiens
tgcccgcattctccac

SEQ ID NO: 41934 - DNA, 17 bp, Homo Sapiens
tgcccgcattctccacc

SEQ ID NO: 41935 - DNA, 18 bp, Homo Sapiens
tgccgaggttgtgagttc

SEQ ID NO: 41936 - DNA, 37 bp, Homo Sapiens; identical to SEQ ID NO: 27542

SEQ ID NO: 41937 - DNA, 16 bp, Homo Sapiens
tgccgtgatcgtatag

SEQ ID NO: 41938 - DNA, 17 bp, Homo Sapiens
tgccgtgatcgtatagt

SEQ ID NO: 41939 - DNA, 18 bp, Homo Sapiens
tgccgtgatcgtatagtg

SEQ ID NO: 41940 - DNA, 19 bp, Homo Sapiens
tgccgtgatcgtatagtgg

SEQ ID NO: 41941 - DNA, 20 bp, Homo Sapiens
tgccgtgatcgtatagtggt

SEQ ID NO: 41942 - DNA, 21 bp, Homo Sapiens
tgccgtgatcgtatagtggtt

SEQ ID NO: 41943 - DNA, 22 bp, Homo Sapiens
tgccgtgatcgtatagtggtta

SEQ ID NO: 41944 - DNA, 23 bp, Homo Sapiens
tgccgtgatcgtatagtggttag

SEQ ID NO: 41945 - DNA, 24 bp, Homo Sapiens
tgccgtgatcgtatagtggttagt

SEQ ID NO: 41946 - DNA, 25 bp, Homo Sapiens
tgccgtgatcgtatagtggttagta

SEQ ID NO: 41947 - DNA, 26 bp, Homo Sapiens
tgccgtgatcgtatagtggttagtac

SEQ ID NO: 41948 - DNA, 27 bp, Homo Sapiens
tgccgtgatcgtatagtggttagtact

SEQ ID NO: 41949 - DNA, 28 bp, Homo Sapiens
tgccgtgatcgtatagtggttagtactc

SEQ ID NO: 41950 - DNA, 29 bp, Homo Sapiens
tgccgtgatcgtatagtggttagtactct

SEQ ID NO: 41951 - DNA, 30 bp, Homo Sapiens; identical to SEQ ID NO: 27558

SEQ ID NO: 41952 - DNA, 31 bp, Homo Sapiens; identical to SEQ ID NO: 27559

SEQ ID NO: 41953 - DNA, 32 bp, Homo Sapiens; identical to SEQ ID NO: 27560

SEQ ID NO: 41954 - DNA, 33 bp, Homo Sapiens; identical to SEQ ID NO: 27561

SEQ ID NO: 41955 - DNA, 34 bp, Homo Sapiens; identical to SEQ ID NO: 27562

SEQ ID NO: 41956 - DNA, 35 bp, Homo Sapiens; identical to SEQ ID NO: 27563

SEQ ID NO: 41957 - DNA, 36 bp, Homo Sapiens; identical to SEQ ID NO: 27564

SEQ ID NO: 41958 - DNA, 37 bp, Homo Sapiens; identical to SEQ ID NO: 27565

SEQ ID NO: 41959 - DNA, 16 bp, Homo Sapiens
tgcctgtggtctagtg

SEQ ID NO: 41960 - DNA, 31 bp, Homo Sapiens
tgcgacccgggttcgattcccgggcggcgca

SEQ ID NO: 41961 - DNA, 32 bp, Homo Sapiens
tgcgagaggtcccgggttcaaatcccggacga

SEQ ID NO: 41962 - DNA, 33 bp, Homo Sapiens
tgcgagaggtcccgggttcaaatcccggacgag

SEQ ID NO: 41963 - DNA, 34 bp, Homo Sapiens; identical to SEQ ID NO: 27585

SEQ ID NO: 41964 - DNA, 35 bp, Homo Sapiens; identical to SEQ ID NO: 27586

SEQ ID NO: 41965 - DNA, 36 bp, Homo Sapiens; identical to SEQ ID NO: 27587

SEQ ID NO: 41966 - DNA, 37 bp, Homo Sapiens; identical to SEQ ID NO: 27588

SEQ ID NO: 41967 - DNA, 38 bp, Homo Sapiens; identical to SEQ ID NO: 27589

SEQ ID NO: 41968 - DNA, 39 bp, Homo Sapiens; identical to SEQ ID NO: 27590

SEQ ID NO: 41969 - DNA, 27 bp, Homo Sapiens
tgcgtgttcaaatcacgtcggggtcac

SEQ ID NO: 41970 - DNA, 17 bp, Homo Sapiens
tgctaatccattgtgct

SEQ ID NO: 41971 - DNA, 34 bp, Homo Sapiens; identical to SEQ ID NO: 27658

SEQ ID NO: 41972 - DNA, 35 bp, Homo Sapiens; identical to SEQ ID NO: 27659

SEQ ID NO: 41973 - DNA, 36 bp, Homo Sapiens; identical to SEQ ID NO: 27660

SEQ ID NO: 41974 - DNA, 26 bp, Homo Sapiens
tgctttacacgcagaaggtcctgggt

SEQ ID NO: 41975 - DNA, 47 bp, Homo Sapiens; identical to SEQ ID NO: 27672

SEQ ID NO: 41976 - DNA, 39 bp, Homo Sapiens
tgctttgcacgcgtgggttcgaatcccatcctcgtcgcc

SEQ ID NO: 41977 - DNA, 21 bp, Homo Sapiens
tggacatatgtccgcgtgggt

SEQ ID NO: 41978 - DNA, 17 bp, Homo Sapiens
tggacgagcgcgctgga

SEQ ID NO: 41979 - DNA, 17 bp, Homo Sapiens
tggactctgaatccagc

SEQ ID NO: 41980 - DNA, 24 bp, Homo Sapiens
tggactctgaatccagcgatccga

SEQ ID NO: 41981 - DNA, 25 bp, Homo Sapiens
tggactctgaatccagcgatccgag

SEQ ID NO: 41982 - DNA, 26 bp, Homo Sapiens
tggactctgaatccagcgatccgagt

SEQ ID NO: 41983 - DNA, 27 bp, Homo Sapiens
tggactctgaatccagcgatccgagtt

SEQ ID NO: 41984 - DNA, 28 bp, Homo Sapiens
tggactctgaatccagcgatccgagttc

SEQ ID NO: 41985 - DNA, 45 bp, Homo Sapiens; identical to SEQ ID NO: 27695

SEQ ID NO: 41986 - DNA, 47 bp, Homo Sapiens
tggactctgaatccagcgatccgagttcaaatctcggtggaacctcc

SEQ ID NO: 41987 - DNA, 21 bp, Homo Sapiens
tggacttaagatccaatggac

SEQ ID NO: 41988 - DNA, 17 bp, Homo Sapiens
tggactttgaatccagc

SEQ ID NO: 41989 - DNA, 25 bp, Homo Sapiens
tggactttgaatccagcgatccgag

SEQ ID NO: 41990 - DNA, 16 bp, Homo Sapiens
tggaggcgtgggttcg

SEQ ID NO: 41991 - DNA, 32 bp, Homo Sapiens; identical to SEQ ID NO: 27710

SEQ ID NO: 41992 - DNA, 34 bp, Homo Sapiens; identical to SEQ ID NO: 27711

SEQ ID NO: 41993 - DNA, 23 bp, Homo Sapiens
tggagtggttatcacgttcgcct

SEQ ID NO: 41994 - DNA, 24 bp, Homo Sapiens
tggagttaaagactttttctctga

SEQ ID NO: 41995 - DNA, 25 bp, Homo Sapiens
tggagttaaagactttttctctgac

SEQ ID NO: 41996 - DNA, 26 bp, Homo Sapiens
tggagttaaagactttttctctgacc

SEQ ID NO: 41997 - DNA, 27 bp, Homo Sapiens
tggagttaaagactttttctctgacca

SEQ ID NO: 41998 - DNA, 16 bp, Homo Sapiens
tggataacgcgtctga

SEQ ID NO: 41999 - DNA, 18 bp, Homo Sapiens
tggataacgcgtctgact

SEQ ID NO: 42000 - DNA, 16 bp, Homo Sapiens
tggataaggcactggc

SEQ ID NO: 42001 - DNA, 35 bp, Homo Sapiens
tggataaggcatcagcctccggagctggggattgt

SEQ ID NO: 42002 - DNA, 16 bp, Homo Sapiens
tggataaggcgtctga

SEQ ID NO: 42003 - DNA, 18 bp, Homo Sapiens
tggataaggcgtctgact

SEQ ID NO: 42004 - DNA, 18 bp, Homo Sapiens
tggataaggcgtctgatt

SEQ ID NO: 42005 - DNA, 20 bp, Homo Sapiens
tggataaggcgtctgattcc

SEQ ID NO: 42006 - DNA, 16 bp, Homo Sapiens
tggatagcgcattgga

SEQ ID NO: 42007 - DNA, 17 bp, Homo Sapiens
tggatagcgcattggac

SEQ ID NO: 42008 - DNA, 29 bp, Homo Sapiens
tggatagctcagtcggtagagcatcagac

SEQ ID NO: 42009 - DNA, 22 bp, Homo Sapiens
tggatcgaaaccatcctctgct

SEQ ID NO: 42010 - DNA, 25 bp, Homo Sapiens
tggatcgaaaccatcctctgctacc

SEQ ID NO: 42011 - DNA, 39 bp, Homo Sapiens; identical to SEQ ID NO: 27735

SEQ ID NO: 42012 - DNA, 41 bp, Homo Sapiens; identical to SEQ ID NO: 27737

SEQ ID NO: 42013 - DNA, 35 bp, Homo Sapiens
tggatttaggctccagtctcttcggaggcgtgggt

SEQ ID NO: 42014 - DNA, 29 bp, Homo Sapiens
tggcccgggttcgactcccggtatgggaa

SEQ ID NO: 42015 - DNA, 30 bp, Homo Sapiens
tggcccgggttcgactcccggtatgggaac

SEQ ID NO: 42016 - DNA, 23 bp, Homo Sapiens
tggccgagcggtctaaggcgctg

SEQ ID NO: 42017 - DNA, 16 bp, Homo Sapiens
tggccgagtggttaag

SEQ ID NO: 42018 - DNA, 17 bp, Homo Sapiens
tggccgagtggttaagg

SEQ ID NO: 42019 - DNA, 21 bp, Homo Sapiens
tggccgcagcaacctcggttc

SEQ ID NO: 42020 - DNA, 22 bp, Homo Sapiens
tggccgcagcaacctcggttcg

SEQ ID NO: 42021 - DNA, 23 bp, Homo Sapiens
tggccgcagcaacctcggttcga

SEQ ID NO: 42022 - DNA, 38 bp, Homo Sapiens
tggccgcagcaacctcggttcgaatccgagtcacggca

SEQ ID NO: 42023 - DNA, 39 bp, Homo Sapiens
tggccgcagcaacctcggttcgaatccgagtcacggcac

SEQ ID NO: 42024 - DNA, 40 bp, Homo Sapiens; identical to SEQ ID NO: 27765

SEQ ID NO: 42025 - DNA, 41 bp, Homo Sapiens; identical to SEQ ID NO: 27766

SEQ ID NO: 42026 - DNA, 16 bp, Homo Sapiens
tggcgcagcggaagcg

SEQ ID NO: 42027 - DNA, 24 bp, Homo Sapiens
tggcgcagcggaagcgtgctgggc

SEQ ID NO: 42028 - DNA, 26 bp, Homo Sapiens
tggcgcagcggaagcgtgctgggccc

SEQ ID NO: 42029 - DNA, 16 bp, Homo Sapiens
tggctaggattcggcg

SEQ ID NO: 42030 - DNA, 24 bp, Homo Sapiens
tggctaggattcggcgctttcacc

SEQ ID NO: 42031 - DNA, 21 bp, Homo Sapiens
tggctgagtgaagcattggac

SEQ ID NO: 42032 - DNA, 22 bp, Homo Sapiens
tggctgagtgaagcattggact

SEQ ID NO: 42033 - DNA, 17 bp, Homo Sapiens
tgggagagcattagact

SEQ ID NO: 42034 - DNA, 19 bp, Homo Sapiens
tgggagagcattagactga

SEQ ID NO: 42035 - DNA, 23 bp, Homo Sapiens
tgggcccataacccagaggtcga

SEQ ID NO: 42036 - DNA, 27 bp, Homo Sapiens
tgggcccataacccagaggtcgatgga

SEQ ID NO: 42037 - DNA, 28 bp, Homo Sapiens
tgggcccataacccagaggtcgatggat

SEQ ID NO: 42038 - DNA, 16 bp, Homo Sapiens
tggggattgtgggttc

SEQ ID NO: 42039 - DNA, 17 bp, Homo Sapiens
tggggattgtgggttcg

SEQ ID NO: 42040 - DNA, 22 bp, Homo Sapiens
tggggattgtgggttcgagtcc

SEQ ID NO: 42041 - DNA, 23 bp, Homo Sapiens
tggggattgtgggttcgagtccc

SEQ ID NO: 42042 - DNA, 24 bp, Homo Sapiens
tggggattgtgggttcgagtccca

SEQ ID NO: 42043 - DNA, 26 bp, Homo Sapiens
tggggattgtgggttcgagtcccatc

SEQ ID NO: 42044 - DNA, 33 bp, Homo Sapiens; identical to SEQ ID NO: 27815

SEQ ID NO: 42045 - DNA, 34 bp, Homo Sapiens; identical to SEQ ID NO: 27816

SEQ ID NO: 42046 - DNA, 35 bp, Homo Sapiens; identical to SEQ ID NO: 27817

SEQ ID NO: 42047 - DNA, 36 bp, Homo Sapiens; identical to SEQ ID NO: 27818

SEQ ID NO: 42048 - DNA, 16 bp, Homo Sapiens
tggggttttgcagtcc

SEQ ID NO: 42049 - DNA, 17 bp, Homo Sapiens
tgggtggttcagtggta

SEQ ID NO: 42050 - DNA, 23 bp, Homo Sapiens
tgggtggttcagtggtagaattc

SEQ ID NO: 42051 - DNA, 25 bp, Homo Sapiens
tgggtggttcagtggtagaattctc

SEQ ID NO: 42052 - DNA, 27 bp, Homo Sapiens
tgggtggttcagtggtagaattctcgc

SEQ ID NO: 42053 - DNA, 28 bp, Homo Sapiens
tgggtggttcagtggtagaattctcgcc

SEQ ID NO: 42054 - DNA, 29 bp, Homo Sapiens
tgggtggttcagtggtagaattctcgcct

SEQ ID NO: 42055 - DNA, 31 bp, Homo Sapiens; identical to SEQ ID NO: 27860

SEQ ID NO: 42056 - DNA, 32 bp, Homo Sapiens; identical to SEQ ID NO: 27861

SEQ ID NO: 42057 - DNA, 33 bp, Homo Sapiens; identical to SEQ ID NO: 27862

SEQ ID NO: 42058 - DNA, 45 bp, Homo Sapiens
tgggtggttcagtggtagaattctcgcctgccacgcgggaggccc

SEQ ID NO: 42059 - DNA, 47 bp, Homo Sapiens
tgggtggttcagtggtagaattctcgcctgccacgcgggaggcccgg

SEQ ID NO: 42060 - DNA, 26 bp, Homo Sapiens
tgggttcgaatcccaccagagtcgcc

SEQ ID NO: 42061 - DNA, 26 bp, Homo Sapiens
tgggttcgaatcccaccctcgtcgcc

SEQ ID NO: 42062 - DNA, 26 bp, Homo Sapiens
tgggttcgaatcccaccgctgccacc

SEQ ID NO: 42063 - DNA, 25 bp, Homo Sapiens
tgggttcgaatcccaccttcgtcgc

SEQ ID NO: 42064 - DNA, 26 bp, Homo Sapiens
tgggttcgaatcccaccttcgtcgcc

SEQ ID NO: 42065 - DNA, 26 bp, Homo Sapiens
tgggttcgaatcccactcctgacacc

SEQ ID NO: 42066 - DNA, 24 bp, Homo Sapiens
tgggttcgaatcccacttctgaca

SEQ ID NO: 42067 - DNA, 25 bp, Homo Sapiens
tgggttcgaatcccacttctgacac

SEQ ID NO: 42068 - DNA, 26 bp, Homo Sapiens
tgggttcgaatcccacttctgacacc

SEQ ID NO: 42069 - DNA, 25 bp, Homo Sapiens
tgggttcgaatcccagcggggcctc

SEQ ID NO: 42070 - DNA, 26 bp, Homo Sapiens
tgggttcgaatcccagcggggcctcc

SEQ ID NO: 42071 - DNA, 25 bp, Homo Sapiens
tgggttcgaatcccagcggtgcctc

SEQ ID NO: 42072 - DNA, 26 bp, Homo Sapiens
tgggttcgaatcccagcggtgcctcc

SEQ ID NO: 42073 - DNA, 24 bp, Homo Sapiens
tgggttcgaatcccatcctcgtcg

SEQ ID NO: 42074 - DNA, 25 bp, Homo Sapiens
tgggttcgaatcccatcctcgtcgc

SEQ ID NO: 42075 - DNA, 26 bp, Homo Sapiens
tgggttcgaatcccatcctcgtcgcc

SEQ ID NO: 42076 - DNA, 27 bp, Homo Sapiens
tgggttcgaatcccatcctcgtcgcca

SEQ ID NO: 42077 - DNA, 24 bp, Homo Sapiens
tgggttcgagccccacgttgggcg

SEQ ID NO: 42078 - DNA, 25 bp, Homo Sapiens
tgggttcgagccccacgttgggcgc

SEQ ID NO: 42079 - DNA, 26 bp, Homo Sapiens
tgggttcgagccccacgttgggcgcc

SEQ ID NO: 42080 - DNA, 26 bp, Homo Sapiens
tgggttcgagccccagtggaaccacc

SEQ ID NO: 42081 - DNA, 26 bp, Homo Sapiens
tgggttcgagtcccaccagagtcgcc

SEQ ID NO: 42082 - DNA, 24 bp, Homo Sapiens
tgggttcgattctcatagtcctag

SEQ ID NO: 42083 - DNA, 25 bp, Homo Sapiens
tgggttcgattctcatagtcctagc

SEQ ID NO: 42084 - DNA, 27 bp, Homo Sapiens
tgggttcgattctcatagtcctagcca

SEQ ID NO: 42085 - DNA, 16 bp, Homo Sapiens
tggtagaattctcgcc

SEQ ID NO: 42086 - DNA, 17 bp, Homo Sapiens
tggtagaattctcgcct

SEQ ID NO: 42087 - DNA, 18 bp, Homo Sapiens
tggtagaattctcgcctc

SEQ ID NO: 42088 - DNA, 19 bp, Homo Sapiens
tggtagaattctcgcctcc

SEQ ID NO: 42089 - DNA, 20 bp, Homo Sapiens
tggtagaattctcgcctccc

SEQ ID NO: 42090 - DNA, 33 bp, Homo Sapiens
tggtagaattctcgcctcccacgcgggagaccc

SEQ ID NO: 42091 - DNA, 35 bp, Homo Sapiens; identical to SEQ ID NO: 27904

SEQ ID NO: 42092 - DNA, 18 bp, Homo Sapiens
tggtagaattctcgcctg

SEQ ID NO: 42093 - DNA, 19 bp, Homo Sapiens
tggtagaattctcgcctgc

SEQ ID NO: 42094 - DNA, 20 bp, Homo Sapiens
tggtagaattctcgcctgcc

SEQ ID NO: 42095 - DNA, 21 bp, Homo Sapiens
tggtagaattctcgcctgcca

SEQ ID NO: 42096 - DNA, 22 bp, Homo Sapiens
tggtagaattctcgcctgccac

SEQ ID NO: 42097 - DNA, 23 bp, Homo Sapiens
tggtagaattctcgcctgccacg

SEQ ID NO: 42098 - DNA, 24 bp, Homo Sapiens
tggtagaattctcgcctgccacgc

SEQ ID NO: 42099 - DNA, 25 bp, Homo Sapiens
tggtagaattctcgcctgccacgcg

SEQ ID NO: 42100 - DNA, 26 bp, Homo Sapiens
tggtagaattctcgcctgccacgcgg

SEQ ID NO: 42101 - DNA, 27 bp, Homo Sapiens
tggtagaattctcgcctgccacgcggg

SEQ ID NO: 42102 - DNA, 28 bp, Homo Sapiens
tggtagaattctcgcctgccacgcggga

SEQ ID NO: 42103 - DNA, 29 bp, Homo Sapiens
tggtagaattctcgcctgccacgcgggag

SEQ ID NO: 42104 - DNA, 31 bp, Homo Sapiens; identical to SEQ ID NO: 27918

SEQ ID NO: 42105 - DNA, 32 bp, Homo Sapiens; identical to SEQ ID NO: 27919

SEQ ID NO: 42106 - DNA, 33 bp, Homo Sapiens; identical to SEQ ID NO: 27920

SEQ ID NO: 42107 - DNA, 34 bp, Homo Sapiens; identical to SEQ ID NO: 27921

SEQ ID NO: 42108 - DNA, 35 bp, Homo Sapiens; identical to SEQ ID NO: 27922

SEQ ID NO: 42109 - DNA, 36 bp, Homo Sapiens; identical to SEQ ID NO: 27923

SEQ ID NO: 42110 - DNA, 37 bp, Homo Sapiens; identical to SEQ ID NO: 27924

SEQ ID NO: 42111 - DNA, 38 bp, Homo Sapiens; identical to SEQ ID NO: 27925

SEQ ID NO: 42112 - DNA, 39 bp, Homo Sapiens; identical to SEQ ID NO: 27926

SEQ ID NO: 42113 - DNA, 16 bp, Homo Sapiens
tggtagagcatttgac

SEQ ID NO: 42114 - DNA, 17 bp, Homo Sapiens
tggtagagcatttgact

SEQ ID NO: 42115 - DNA, 18 bp, Homo Sapiens
tggtagagcatttgactg

SEQ ID NO: 42116 - DNA, 19 bp, Homo Sapiens
tggtagagcatttgactgc

SEQ ID NO: 42117 - DNA, 24 bp, Homo Sapiens
tggtagagcatttgactgcagatc

SEQ ID NO: 42118 - DNA, 16 bp, Homo Sapiens
tggtagagcgcatgct

SEQ ID NO: 42119 - DNA, 16 bp, Homo Sapiens
tggtagagcgcgtgct

SEQ ID NO: 42120 - DNA, 17 bp, Homo Sapiens
tggtagagcgcgtgctt

SEQ ID NO: 42121 - DNA, 34 bp, Homo Sapiens
tggtagagcgcgtgcttagcatgcacgaggcccc

SEQ ID NO: 42122 - DNA, 16 bp, Homo Sapiens
tggtagagcgctcgct

SEQ ID NO: 42123 - DNA, 16 bp, Homo Sapiens
tggtagagcggaggac

SEQ ID NO: 42124 - DNA, 25 bp, Homo Sapiens
tggtagagcggaggactgtagatcc

SEQ ID NO: 42125 - DNA, 23 bp, Homo Sapiens
tggtatagtggtaagcatagctg

SEQ ID NO: 42126 - DNA, 23 bp, Homo Sapiens
tggtatagtggtgagcatagctg

SEQ ID NO: 42127 - DNA, 44 bp, Homo Sapiens; identical to SEQ ID NO: 27956

SEQ ID NO: 42128 - DNA, 46 bp, Homo Sapiens
tggtatagtggtgagcatagctgccttccaagcagttgacccgggt

SEQ ID NO: 42129 - DNA, 36 bp, Homo Sapiens; identical to SEQ ID NO: 27963

SEQ ID NO: 42130 - DNA, 37 bp, Homo Sapiens; identical to SEQ ID NO: 27964

SEQ ID NO: 42131 - DNA, 17 bp, Homo Sapiens
tggtatcatgcaagatt

SEQ ID NO: 42132 - DNA, 18 bp, Homo Sapiens
tggtatcatgcaagattc

SEQ ID NO: 42133 - DNA, 16 bp, Homo Sapiens
tggtcatcacgttcgc

SEQ ID NO: 42134 - DNA, 17 bp, Homo Sapiens
tggtcatcacgttcgcc

SEQ ID NO: 42135 - DNA, 16 bp, Homo Sapiens
tggtcgtggttgtagt

SEQ ID NO: 42136 - DNA, 17 bp, Homo Sapiens
tggtcgtggttgtagtc

SEQ ID NO: 42137 - DNA, 18 bp, Homo Sapiens
tggtcgtggttgtagtcc

SEQ ID NO: 42138 - DNA, 19 bp, Homo Sapiens
tggtcgtggttgtagtccg

SEQ ID NO: 42139 - DNA, 20 bp, Homo Sapiens
tggtcgtggttgtagtccgt

SEQ ID NO: 42140 - DNA, 21 bp, Homo Sapiens
tggtcgtggttgtagtccgtg

SEQ ID NO: 42141 - DNA, 22 bp, Homo Sapiens
tggtcgtggttgtagtccgtgc

SEQ ID NO: 42142 - DNA, 23 bp, Homo Sapiens
tggtcgtggttgtagtccgtgcg

SEQ ID NO: 42143 - DNA, 25 bp, Homo Sapiens
tggtcgtggttgtagtccgtgcgag

SEQ ID NO: 42144 - DNA, 26 bp, Homo Sapiens
tggtcgtggttgtagtccgtgcgaga

SEQ ID NO: 42145 - DNA, 27 bp, Homo Sapiens
tggtcgtggttgtagtccgtgcgagaa

SEQ ID NO: 42146 - DNA, 28 bp, Homo Sapiens
tggtcgtggttgtagtccgtgcgagaat

SEQ ID NO: 42147 - DNA, 29 bp, Homo Sapiens
tggtcgtggttgtagtccgtgcgagaata

SEQ ID NO: 42148 - DNA, 30 bp, Homo Sapiens; identical to SEQ ID NO: 27986

SEQ ID NO: 42149 - DNA, 31 bp, Homo Sapiens; identical to SEQ ID NO: 27987

SEQ ID NO: 42150 - DNA, 32 bp, Homo Sapiens; identical to SEQ ID NO: 27988

SEQ ID NO: 42151 - DNA, 20 bp, Homo Sapiens
tggtctaaggcgccagactc

SEQ ID NO: 42152 - DNA, 17 bp, Homo Sapiens
tggtctaaggcgctgga

SEQ ID NO: 42153 - DNA, 17 bp, Homo Sapiens
tggtctagcggttagga

SEQ ID NO: 42154 - DNA, 18 bp, Homo Sapiens
tggtctagcggttaggat

SEQ ID NO: 42155 - DNA, 19 bp, Homo Sapiens
tggtctagcggttaggatt

SEQ ID NO: 42156 - DNA, 20 bp, Homo Sapiens
tggtctagcggttaggattc

SEQ ID NO: 42157 - DNA, 21 bp, Homo Sapiens
tggtctagcggttaggattcc

SEQ ID NO: 42158 - DNA, 22 bp, Homo Sapiens
tggtctagcggttaggattcct

SEQ ID NO: 42159 - DNA, 23 bp, Homo Sapiens
tggtctagcggttaggattcctg

SEQ ID NO: 42160 - DNA, 24 bp, Homo Sapiens
tggtctagcggttaggattcctgg

SEQ ID NO: 42161 - DNA, 25 bp, Homo Sapiens
tggtctagcggttaggattcctggt

SEQ ID NO: 42162 - DNA, 26 bp, Homo Sapiens
tggtctagcggttaggattcctggtt

SEQ ID NO: 42163 - DNA, 28 bp, Homo Sapiens
tggtctagcggttaggattcctggtttt

SEQ ID NO: 42164 - DNA, 30 bp, Homo Sapiens; identical to SEQ ID NO: 28005

SEQ ID NO: 42165 - DNA, 33 bp, Homo Sapiens; identical to SEQ ID NO: 28006

SEQ ID NO: 42166 - DNA, 35 bp, Homo Sapiens
tggtctagcggttaggattcctggttttcacccag

SEQ ID NO: 42167 - DNA, 42 bp, Homo Sapiens; identical to SEQ ID NO: 28008

SEQ ID NO: 42168 - DNA, 44 bp, Homo Sapiens; identical to SEQ ID NO: 28009

SEQ ID NO: 42169 - DNA, 19 bp, Homo Sapiens
tggtctaggggtatgattc

SEQ ID NO: 42170 - DNA, 21 bp, Homo Sapiens
tggtctaggggtatgattctc

SEQ ID NO: 42171 - DNA, 24 bp, Homo Sapiens
tggtctaggggtatgattctcgct

SEQ ID NO: 42172 - DNA, 25 bp, Homo Sapiens
tggtctaggggtatgattctcgctt

SEQ ID NO: 42173 - DNA, 23 bp, Homo Sapiens
tggtctagtggctaggattcggc

SEQ ID NO: 42174 - DNA, 18 bp, Homo Sapiens
tggtctagtggttaggat

SEQ ID NO: 42175 - DNA, 19 bp, Homo Sapiens
tggtctagtggttaggatt

SEQ ID NO: 42176 - DNA, 23 bp, Homo Sapiens
tggtctagtggttaggattcggc

SEQ ID NO: 42177 - DNA, 24 bp, Homo Sapiens
tggtctagtggttaggattcggcg

SEQ ID NO: 42178 - DNA, 25 bp, Homo Sapiens
tggtctagtggttaggattcggcgc

SEQ ID NO: 42179 - DNA, 26 bp, Homo Sapiens
tggtctagtggttaggattcggcgct

SEQ ID NO: 42180 - DNA, 27 bp, Homo Sapiens
tggtctagtggttaggattcggcgctc

SEQ ID NO: 42181 - DNA, 28 bp, Homo Sapiens
tggtctagtggttaggattcggcgctct

SEQ ID NO: 42182 - DNA, 29 bp, Homo Sapiens
tggtctagtggttaggattcggcgctctc

SEQ ID NO: 42183 - DNA, 30 bp, Homo Sapiens; identical to SEQ ID NO: 28039

SEQ ID NO: 42184 - DNA, 31 bp, Homo Sapiens
tggtctagtggttaggattcggcgctctcac

SEQ ID NO: 42185 - DNA, 32 bp, Homo Sapiens; identical to SEQ ID NO: 28040

SEQ ID NO: 42186 - DNA, 33 bp, Homo Sapiens
tggtctagtggttaggattcggcgctctcaccg

SEQ ID NO: 42187 - DNA, 35 bp, Homo Sapiens; identical to SEQ ID NO: 28041

SEQ ID NO: 42188 - DNA, 41 bp, Homo Sapiens; identical to SEQ ID NO: 28042

SEQ ID NO: 42189 - DNA, 42 bp, Homo Sapiens; identical to SEQ ID NO: 28043

SEQ ID NO: 42190 - DNA, 43 bp, Homo Sapiens
tggtctagtggttaggattcggcgctctcaccgccgcggcccg

SEQ ID NO: 42191 - DNA, 44 bp, Homo Sapiens; identical to SEQ ID NO: 28044

SEQ ID NO: 42192 - DNA, 45 bp, Homo Sapiens; identical to SEQ ID NO: 28045

SEQ ID NO: 42193 - DNA, 18 bp, Homo Sapiens
tggtgagcactctggact

SEQ ID NO: 42194 - DNA, 24 bp, Homo Sapiens
tggtgagcactctggactctgaat

SEQ ID NO: 42195 - DNA, 25 bp, Homo Sapiens
tggtgagcactctggactctgaatc

SEQ ID NO: 42196 - DNA, 26 bp, Homo Sapiens
tggtgagcactctggactctgaatcc

SEQ ID NO: 42197 - DNA, 27 bp, Homo Sapiens
tggtgagcactctggactctgaatcca

SEQ ID NO: 42198 - DNA, 28 bp, Homo Sapiens
tggtgagcactctggactctgaatccag

SEQ ID NO: 42199 - DNA, 29 bp, Homo Sapiens
tggtgagcactctggactctgaatccagc

SEQ ID NO: 42200 - DNA, 16 bp, Homo Sapiens
tggtgagtatccccgc

SEQ ID NO: 42201 - DNA, 23 bp, Homo Sapiens
tggtgagtatccccgcctgtcac

SEQ ID NO: 42202 - DNA, 16 bp, Homo Sapiens
tggtggagttaaagac

SEQ ID NO: 42203 - DNA, 24 bp, Homo Sapiens
tggtggagttaaagactttttctc

SEQ ID NO: 42204 - DNA, 28 bp, Homo Sapiens
tggtggagttaaagactttttctctgac

SEQ ID NO: 42205 - DNA, 29 bp, Homo Sapiens
tggtggagttaaagactttttctctgacc

SEQ ID NO: 42206 - DNA, 30 bp, Homo Sapiens; identical to SEQ ID NO: 28095

SEQ ID NO: 42207 - DNA, 16 bp, Homo Sapiens
tggtggtctagtggct

SEQ ID NO: 42208 - DNA, 26 bp, Homo Sapiens
tggtggtctagtggctaggattcggc

SEQ ID NO: 42209 - DNA, 29 bp, Homo Sapiens
tggtggtctagtggctaggattcggcgct

SEQ ID NO: 42210 - DNA, 21 bp, Homo Sapiens
tggtggtctagtggttaggat

SEQ ID NO: 42211 - DNA, 22 bp, Homo Sapiens
tggtggtctagtggttaggatt

SEQ ID NO: 42212 - DNA, 23 bp, Homo Sapiens
tggtggtctagtggttaggattc

SEQ ID NO: 42213 - DNA, 24 bp, Homo Sapiens
tggtggtctagtggttaggattcg

SEQ ID NO: 42214 - DNA, 26 bp, Homo Sapiens
tggtggtctagtggttaggattcggc

SEQ ID NO: 42215 - DNA, 28 bp, Homo Sapiens
tggtggtctagtggttaggattcggcgc

SEQ ID NO: 42216 - DNA, 29 bp, Homo Sapiens
tggtggtctagtggttaggattcggcgct

SEQ ID NO: 42217 - DNA, 30 bp, Homo Sapiens; identical to SEQ ID NO: 28133

SEQ ID NO: 42218 - DNA, 31 bp, Homo Sapiens; identical to SEQ ID NO: 28134

SEQ ID NO: 42219 - DNA, 32 bp, Homo Sapiens; identical to SEQ ID NO: 28135

SEQ ID NO: 42220 - DNA, 33 bp, Homo Sapiens; identical to SEQ ID NO: 28136

SEQ ID NO: 42221 - DNA, 38 bp, Homo Sapiens; identical to SEQ ID NO: 28140

SEQ ID NO: 42222 - DNA, 45 bp, Homo Sapiens; identical to SEQ ID NO: 28141

SEQ ID NO: 42223 - DNA, 47 bp, Homo Sapiens; identical to SEQ ID NO: 28142

SEQ ID NO: 42224 - DNA, 26 bp, Homo Sapiens
tggtggttcagtggtagaattctcgc

SEQ ID NO: 42225 - DNA, 27 bp, Homo Sapiens
tggtggttcagtggtagaattctcgcc

SEQ ID NO: 42226 - DNA, 28 bp, Homo Sapiens
tggtggttcagtggtagaattctcgcct

SEQ ID NO: 42227 - DNA, 31 bp, Homo Sapiens; identical to SEQ ID NO: 28160

SEQ ID NO: 42228 - DNA, 44 bp, Homo Sapiens; identical to SEQ ID NO: 28162

SEQ ID NO: 42229 - DNA, 46 bp, Homo Sapiens; identical to SEQ ID NO: 28163

SEQ ID NO: 42230 - DNA, 28 bp, Homo Sapiens
tggtggttcgagcccacccagggacgcc

SEQ ID NO: 42231 - DNA, 26 bp, Homo Sapiens
tggtgtaatggtaagcactctggact

SEQ ID NO: 42232 - DNA, 26 bp, Homo Sapiens
tggtgtaatggtgagcactctggact

SEQ ID NO: 42233 - DNA, 27 bp, Homo Sapiens
tggtgtaatggtgagcactctggactc

SEQ ID NO: 42234 - DNA, 33 bp, Homo Sapiens; identical to SEQ ID NO: 28178

SEQ ID NO: 42235 - DNA, 16 bp, Homo Sapiens
tggtgtaatggttagc

SEQ ID NO: 42236 - DNA, 20 bp, Homo Sapiens
tggtgtaatggttagcactc

SEQ ID NO: 42237 - DNA, 23 bp, Homo Sapiens
tggtgtaatggttagcactctgg

SEQ ID NO: 42238 - DNA, 24 bp, Homo Sapiens
tggtgtaatggttagcactctgga

SEQ ID NO: 42239 - DNA, 25 bp, Homo Sapiens
tggtgtaatggttagcactctggac

SEQ ID NO: 42240 - DNA, 26 bp, Homo Sapiens
tggtgtaatggttagcactctggact

SEQ ID NO: 42241 - DNA, 27 bp, Homo Sapiens
tggtgtaatggttagcactctggactc

SEQ ID NO: 42242 - DNA, 28 bp, Homo Sapiens
tggtgtaatggttagcactctggactct

SEQ ID NO: 42243 - DNA, 29 bp, Homo Sapiens
tggtgtaatggttagcactctggactctg

SEQ ID NO: 42244 - DNA, 30 bp, Homo Sapiens; identical to SEQ ID NO: 28193

SEQ ID NO: 42245 - DNA, 31 bp, Homo Sapiens; identical to SEQ ID NO: 28194

SEQ ID NO: 42246 - DNA, 32 bp, Homo Sapiens
tggtgtaatggttagcactctggactctgaat

SEQ ID NO: 42247 - DNA, 33 bp, Homo Sapiens; identical to SEQ ID NO: 28195

SEQ ID NO: 42248 - DNA, 34 bp, Homo Sapiens; identical to SEQ ID NO: 28196

SEQ ID NO: 42249 - DNA, 35 bp, Homo Sapiens; identical to SEQ ID NO: 28197

SEQ ID NO: 42250 - DNA, 44 bp, Homo Sapiens; identical to SEQ ID NO: 28198

SEQ ID NO: 42251 - DNA, 45 bp, Homo Sapiens; identical to SEQ ID NO: 28199

SEQ ID NO: 42252 - DNA, 46 bp, Homo Sapiens; identical to SEQ ID NO: 28200

SEQ ID NO: 42253 - DNA, 47 bp, Homo Sapiens; identical to SEQ ID NO: 28201

SEQ ID NO: 42254 - DNA, 29 bp, Homo Sapiens
tggtgtaatggttagcactctggactttg

SEQ ID NO: 42255 - DNA, 31 bp, Homo Sapiens
tggtgtaatggttagcactctggactttgaa

SEQ ID NO: 42256 - DNA, 32 bp, Homo Sapiens; identical to SEQ ID NO: 28203

SEQ ID NO: 42257 - DNA, 33 bp, Homo Sapiens; identical to SEQ ID NO: 28204

SEQ ID NO: 42258 - DNA, 34 bp, Homo Sapiens
tggtgtaatggttagcactctggactttgaatcc

SEQ ID NO: 42259 - DNA, 35 bp, Homo Sapiens
tggtgtaatggttagcactctggactttgaatcca

SEQ ID NO: 42260 - DNA, 44 bp, Homo Sapiens
tggtgtaatggttagcactctggactttgaatccagcgatccga

SEQ ID NO: 42261 - DNA, 46 bp, Homo Sapiens
tggtgtaatggttagcactctggactttgaatccagcgatccgagt

SEQ ID NO: 42262 - DNA, 16 bp, Homo Sapiens
tggtgtagtggtatca

SEQ ID NO: 42263 - DNA, 18 bp, Homo Sapiens
tggtgtagtggtatcatg

SEQ ID NO: 42264 - DNA, 20 bp, Homo Sapiens
tggtgtagtggtatcatgca

SEQ ID NO: 42265 - DNA, 25 bp, Homo Sapiens
tggtgtagtggtatcatgcaagatt

SEQ ID NO: 42266 - DNA, 26 bp, Homo Sapiens
tggtgtagtggtatcatgcaagattc

SEQ ID NO: 42267 - DNA, 32 bp, Homo Sapiens; identical to SEQ ID NO: 28214

SEQ ID NO: 42268 - DNA, 43 bp, Homo Sapiens; identical to SEQ ID NO: 28217

SEQ ID NO: 42269 - DNA, 45 bp, Homo Sapiens; identical to SEQ ID NO: 28219

SEQ ID NO: 42270 - DNA, 16 bp, Homo Sapiens
tggttaaggcattgga

SEQ ID NO: 42271 - DNA, 17 bp, Homo Sapiens
tggttaaggcattggac

SEQ ID NO: 42272 - DNA, 18 bp, Homo Sapiens
tggttaaggcattggact

SEQ ID NO: 42273 - DNA, 20 bp, Homo Sapiens
tggttaaggcattggactta

SEQ ID NO: 42274 - DNA, 17 bp, Homo Sapiens
tggttaaggcgatggac

SEQ ID NO: 42275 - DNA, 16 bp, Homo Sapiens
tggttaaggcgttgga

SEQ ID NO: 42276 - DNA, 17 bp, Homo Sapiens
tggttaaggcgttggac

SEQ ID NO: 42277 - DNA, 17 bp, Homo Sapiens
tggttaaggtgatggac

SEQ ID NO: 42278 - DNA, 18 bp, Homo Sapiens
tggttaaggtgatggact

SEQ ID NO: 42279 - DNA, 16 bp, Homo Sapiens
tggttagcactctgga

SEQ ID NO: 42280 - DNA, 17 bp, Homo Sapiens
tggttagcactctggac

SEQ ID NO: 42281 - DNA, 18 bp, Homo Sapiens
tggttagcactctggact

SEQ ID NO: 42282 - DNA, 19 bp, Homo Sapiens
tggttagcactctggactc

SEQ ID NO: 42283 - DNA, 20 bp, Homo Sapiens
tggttagcactctggactct

SEQ ID NO: 42284 - DNA, 21 bp, Homo Sapiens
tggttagcactctggactctg

SEQ ID NO: 42285 - DNA, 22 bp, Homo Sapiens
tggttagcactctggactctga

SEQ ID NO: 42286 - DNA, 23 bp, Homo Sapiens
tggttagcactctggactctgaa

SEQ ID NO: 42287 - DNA, 24 bp, Homo Sapiens
tggttagcactctggactctgaat

SEQ ID NO: 42288 - DNA, 25 bp, Homo Sapiens
tggttagcactctggactctgaatc

SEQ ID NO: 42289 - DNA, 26 bp, Homo Sapiens
tggttagcactctggactctgaatcc

SEQ ID NO: 42290 - DNA, 27 bp, Homo Sapiens
tggttagcactctggactctgaatcca

SEQ ID NO: 42291 - DNA, 28 bp, Homo Sapiens
tggttagcactctggactctgaatccag

SEQ ID NO: 42292 - DNA, 29 bp, Homo Sapiens
tggttagcactctggactctgaatccagc

SEQ ID NO: 42293 - DNA, 30 bp, Homo Sapiens; identical to SEQ ID NO: 28239

SEQ ID NO: 42294 - DNA, 34 bp, Homo Sapiens; identical to SEQ ID NO: 28240

SEQ ID NO: 42295 - DNA, 37 bp, Homo Sapiens; identical to SEQ ID NO: 28242

SEQ ID NO: 42296 - DNA, 38 bp, Homo Sapiens; identical to SEQ ID NO: 28243

SEQ ID NO: 42297 - DNA, 40 bp, Homo Sapiens; identical to SEQ ID NO: 28245

SEQ ID NO: 42298 - DNA, 41 bp, Homo Sapiens; identical to SEQ ID NO: 28246

SEQ ID NO: 42299 - DNA, 22 bp, Homo Sapiens
tggttagcactctggactttga

SEQ ID NO: 42300 - DNA, 23 bp, Homo Sapiens
tggttagcactctggactttgaa

SEQ ID NO: 42301 - DNA, 25 bp, Homo Sapiens
tggttagcactctggactttgaatc

SEQ ID NO: 42302 - DNA, 26 bp, Homo Sapiens
tggttagcactctggactttgaatcc

SEQ ID NO: 42303 - DNA, 29 bp, Homo Sapiens
tggttagcactctggactttgaatccagc

SEQ ID NO: 42304 - DNA, 37 bp, Homo Sapiens; identical to SEQ ID NO: 28255

SEQ ID NO: 42305 - DNA, 40 bp, Homo Sapiens; identical to SEQ ID NO: 28257

SEQ ID NO: 42306 - DNA, 16 bp, Homo Sapiens
tggttaggattcggcg

SEQ ID NO: 42307 - DNA, 17 bp, Homo Sapiens
tggttaggattcggcgc

SEQ ID NO: 42308 - DNA, 18 bp, Homo Sapiens
tggttaggattcggcgct

SEQ ID NO: 42309 - DNA, 19 bp, Homo Sapiens
tggttaggattcggcgctc

SEQ ID NO: 42310 - DNA, 20 bp, Homo Sapiens
tggttaggattcggcgctct

SEQ ID NO: 42311 - DNA, 21 bp, Homo Sapiens
tggttaggattcggcgctctc

SEQ ID NO: 42312 - DNA, 22 bp, Homo Sapiens
tggttaggattcggcgctctca

SEQ ID NO: 42313 - DNA, 23 bp, Homo Sapiens
tggttaggattcggcgctctcac

SEQ ID NO: 42314 - DNA, 24 bp, Homo Sapiens
tggttaggattcggcgctctcacc

SEQ ID NO: 42315 - DNA, 25 bp, Homo Sapiens
tggttaggattcggcgctctcaccg

SEQ ID NO: 42316 - DNA, 26 bp, Homo Sapiens
tggttaggattcggcgctctcaccgc

SEQ ID NO: 42317 - DNA, 27 bp, Homo Sapiens
tggttaggattcggcgctctcaccgcc

SEQ ID NO: 42318 - DNA, 34 bp, Homo Sapiens; identical to SEQ ID NO: 28280

SEQ ID NO: 42319 - DNA, 35 bp, Homo Sapiens; identical to SEQ ID NO: 28281

SEQ ID NO: 42320 - DNA, 36 bp, Homo Sapiens; identical to SEQ ID NO: 28282

SEQ ID NO: 42321 - DNA, 37 bp, Homo Sapiens; identical to SEQ ID NO: 28283

SEQ ID NO: 42322 - DNA, 39 bp, Homo Sapiens; identical to SEQ ID NO: 28285

SEQ ID NO: 42323 - DNA, 40 bp, Homo Sapiens; identical to SEQ ID NO: 28286

SEQ ID NO: 42324 - DNA, 16 bp, Homo Sapiens
tggttagtactctgcg

SEQ ID NO: 42325 - DNA, 17 bp, Homo Sapiens
tggttagtactctgcgt

SEQ ID NO: 42326 - DNA, 18 bp, Homo Sapiens
tggttagtactctgcgtt

SEQ ID NO: 42327 - DNA, 19 bp, Homo Sapiens
tggttagtactctgcgttg

SEQ ID NO: 42328 - DNA, 20 bp, Homo Sapiens
tggttagtactctgcgttgt

SEQ ID NO: 42329 - DNA, 21 bp, Homo Sapiens
tggttagtactctgcgttgtg

SEQ ID NO: 42330 - DNA, 24 bp, Homo Sapiens
tggttagtactctgcgttgtggcc

SEQ ID NO: 42331 - DNA, 25 bp, Homo Sapiens
tggttagtactctgcgttgtggccg

SEQ ID NO: 42332 - DNA, 29 bp, Homo Sapiens
tggttagtactctgcgttgtggccgcagc

SEQ ID NO: 42333 - DNA, 33 bp, Homo Sapiens; identical to SEQ ID NO: 28298

SEQ ID NO: 42334 - DNA, 34 bp, Homo Sapiens; identical to SEQ ID NO: 28299

SEQ ID NO: 42335 - DNA, 37 bp, Homo Sapiens
tggttagtactctgcgttgtggccgcagcaacctcgg

SEQ ID NO: 42336 - DNA, 38 bp, Homo Sapiens; identical to SEQ ID NO: 28300

SEQ ID NO: 42337 - DNA, 40 bp, Homo Sapiens
tggttagtactctgcgttgtggccgcagcaacctcggttc

SEQ ID NO: 42338 - DNA, 25 bp, Homo Sapiens
tggttatacccttcccgtactacca

SEQ ID NO: 42339 - DNA, 16 bp, Homo Sapiens
tggttatcacgtctgc

SEQ ID NO: 42340 - DNA, 17 bp, Homo Sapiens
tggttatcacgtctgct

SEQ ID NO: 42341 - DNA, 18 bp, Homo Sapiens
tggttatcacgtctgctt

SEQ ID NO: 42342 - DNA, 19 bp, Homo Sapiens
tggttatcacgtctgcttt

SEQ ID NO: 42343 - DNA, 16 bp, Homo Sapiens
tggttatcacgttcgc

SEQ ID NO: 42344 - DNA, 17 bp, Homo Sapiens
tggttatcacgttcgcc

SEQ ID NO: 42345 - DNA, 18 bp, Homo Sapiens
tggttatcacgttcgcct

SEQ ID NO: 42346 - DNA, 19 bp, Homo Sapiens
tggttatcacgttcgcctc

SEQ ID NO: 42347 - DNA, 20 bp, Homo Sapiens
tggttatcacgttcgcctca

SEQ ID NO: 42348 - DNA, 21 bp, Homo Sapiens
tggttatcacgttcgcctcac

SEQ ID NO: 42349 - DNA, 23 bp, Homo Sapiens
tggttatcacgttcgcctcacac

SEQ ID NO: 42350 - DNA, 37 bp, Homo Sapiens
tggttatcacgttcgcctcacacgcgaaaggtccccg

SEQ ID NO: 42351 - DNA, 38 bp, Homo Sapiens
tggttatcacgttcgcctcacacgcgaaaggtccccgg

SEQ ID NO: 42352 - DNA, 19 bp, Homo Sapiens
tggttcaaatccgggtgcc

SEQ ID NO: 42353 - DNA, 20 bp, Homo Sapiens
tggttcaaatccgggtgccc

SEQ ID NO: 42354 - DNA, 23 bp, Homo Sapiens
tggttcaaatccgggtgccccct

SEQ ID NO: 42355 - DNA, 24 bp, Homo Sapiens
tggttcaatcccgggtttcggcac

SEQ ID NO: 42356 - DNA, 18 bp, Homo Sapiens
tggttcagtggtagaatt

SEQ ID NO: 42357 - DNA, 19 bp, Homo Sapiens
tggttcagtggtagaattc

SEQ ID NO: 42358 - DNA, 22 bp, Homo Sapiens
tggttcagtggtagaattctcg

SEQ ID NO: 42359 - DNA, 23 bp, Homo Sapiens
tggttcagtggtagaattctcgc

SEQ ID NO: 42360 - DNA, 24 bp, Homo Sapiens
tggttcagtggtagaattctcgcc

SEQ ID NO: 42361 - DNA, 25 bp, Homo Sapiens
tggttcagtggtagaattctcgcct

SEQ ID NO: 42362 - DNA, 43 bp, Homo Sapiens
tggttcagtggtagaattctcgcctcccacgcgggagacccgg

SEQ ID NO: 42363 - DNA, 26 bp, Homo Sapiens
tggttcagtggtagaattctcgcctg

SEQ ID NO: 42364 - DNA, 27 bp, Homo Sapiens
tggttcagtggtagaattctcgcctgc

SEQ ID NO: 42365 - DNA, 28 bp, Homo Sapiens
tggttcagtggtagaattctcgcctgcc

SEQ ID NO: 42366 - DNA, 29 bp, Homo Sapiens
tggttcagtggtagaattctcgcctgcca

SEQ ID NO: 42367 - DNA, 30 bp, Homo Sapiens; identical to SEQ ID NO: 28340

SEQ ID NO: 42368 - DNA, 31 bp, Homo Sapiens; identical to SEQ ID NO: 28341

SEQ ID NO: 42369 - DNA, 32 bp, Homo Sapiens; identical to SEQ ID NO: 28342

SEQ ID NO: 42370 - DNA, 36 bp, Homo Sapiens
tggttcagtggtagaattctcgcctgccacgcggga

SEQ ID NO: 42371 - DNA, 40 bp, Homo Sapiens; identical to SEQ ID NO: 28344

SEQ ID NO: 42372 - DNA, 41 bp, Homo Sapiens; identical to SEQ ID NO: 28345

SEQ ID NO: 42373 - DNA, 42 bp, Homo Sapiens; identical to SEQ ID NO: 28346

SEQ ID NO: 42374 - DNA, 43 bp, Homo Sapiens; identical to SEQ ID NO: 28347

SEQ ID NO: 42375 - DNA, 44 bp, Homo Sapiens; identical to SEQ ID NO: 28348

SEQ ID NO: 42376 - DNA, 45 bp, Homo Sapiens; identical to SEQ ID NO: 28349

SEQ ID NO: 42377 - DNA, 24 bp, Homo Sapiens
tggttcgaatccggctcgaaggac

SEQ ID NO: 42378 - DNA, 25 bp, Homo Sapiens
tggttcgaatccggctcgaaggacc

SEQ ID NO: 42379 - DNA, 24 bp, Homo Sapiens
tggttcgaatccggctcggaggac

SEQ ID NO: 42380 - DNA, 25 bp, Homo Sapiens
tggttcgaatccggctcggaggacc

SEQ ID NO: 42381 - DNA, 25 bp, Homo Sapiens
tggttcgagcccacccagggacgcc

SEQ ID NO: 42382 - DNA, 21 bp, Homo Sapiens
tggttcgatcccgggtttcgg

SEQ ID NO: 42383 - DNA, 24 bp, Homo Sapiens
tggttcgatcccgggtttcggcac

SEQ ID NO: 42384 - DNA, 24 bp, Homo Sapiens
tggttcgattccggctcgaaggac

SEQ ID NO: 42385 - DNA, 25 bp, Homo Sapiens
tggttcgattccggctcgaaggacc

SEQ ID NO: 42386 - DNA, 16 bp, Homo Sapiens
tggttgtagtccgtgc

SEQ ID NO: 42387 - DNA, 20 bp, Homo Sapiens
tggttgtagtccgtgcgaga

SEQ ID NO: 42388 - DNA, 21 bp, Homo Sapiens
tggttgtagtccgtgcgagaa

SEQ ID NO: 42389 - DNA, 22 bp, Homo Sapiens
tggttgtagtccgtgcgagaat

SEQ ID NO: 42390 - DNA, 23 bp, Homo Sapiens
tggttgtagtccgtgcgagaata

SEQ ID NO: 42391 - DNA, 25 bp, Homo Sapiens
tggttgtagtccgtgcgagaatacc

SEQ ID NO: 42392 - DNA, 26 bp, Homo Sapiens
tggttgtagtccgtgcgagaatacca

SEQ ID NO: 42393 - DNA, 47 bp, Homo Sapiens; identical to SEQ ID NO: 28378

SEQ ID NO: 42394 - DNA, 28 bp, Homo Sapiens
tggtttttcatatcattggtcgtggttg

SEQ ID NO: 42395 - DNA, 45 bp, Homo Sapiens; identical to SEQ ID NO: 28390

SEQ ID NO: 42396 - DNA, 47 bp, Homo Sapiens; identical to SEQ ID NO: 28391

SEQ ID NO: 42397 - DNA, 22 bp, Homo Sapiens
tgtaaaccggagatgaaaacct

SEQ ID NO: 42398 - DNA, 34 bp, Homo Sapiens; identical to SEQ ID NO: 28407

SEQ ID NO: 42399 - DNA, 36 bp, Homo Sapiens; identical to SEQ ID NO: 28409

SEQ ID NO: 42400 - DNA, 37 bp, Homo Sapiens; identical to SEQ ID NO: 28410

SEQ ID NO: 42401 - DNA, 38 bp, Homo Sapiens; identical to SEQ ID NO: 28411

SEQ ID NO: 42402 - DNA, 26 bp, Homo Sapiens
tgtaatggtgagcactctggactctg

SEQ ID NO: 42403 - DNA, 17 bp, Homo Sapiens
tgtaatggttagcactc

SEQ ID NO: 42404 - DNA, 20 bp, Homo Sapiens
tgtaatggttagcactctgg

SEQ ID NO: 42405 - DNA, 21 bp, Homo Sapiens
tgtaatggttagcactctgga

SEQ ID NO: 42406 - DNA, 23 bp, Homo Sapiens
tgtaatggttagcactctggact

SEQ ID NO: 42407 - DNA, 24 bp, Homo Sapiens
tgtaatggttagcactctggactc

SEQ ID NO: 42408 - DNA, 25 bp, Homo Sapiens
tgtaatggttagcactctggactct

SEQ ID NO: 42409 - DNA, 26 bp, Homo Sapiens
tgtaatggttagcactctggactctg

SEQ ID NO: 42410 - DNA, 27 bp, Homo Sapiens
tgtaatggttagcactctggactctga

SEQ ID NO: 42411 - DNA, 28 bp, Homo Sapiens
tgtaatggttagcactctggactctgaa

SEQ ID NO: 42412 - DNA, 29 bp, Homo Sapiens
tgtaatggttagcactctggactctgaat

SEQ ID NO: 42413 - DNA, 30 bp, Homo Sapiens; identical to SEQ ID NO: 28440

SEQ ID NO: 42414 - DNA, 31 bp, Homo Sapiens; identical to SEQ ID NO: 28441

SEQ ID NO: 42415 - DNA, 33 bp, Homo Sapiens
tgtaatggttagcactctggactctgaatccag

SEQ ID NO: 42416 - DNA, 43 bp, Homo Sapiens; identical to SEQ ID NO: 28443

SEQ ID NO: 42417 - DNA, 30 bp, Homo Sapiens; identical to SEQ ID NO: 28449

SEQ ID NO: 42418 - DNA, 43 bp, Homo Sapiens; identical to SEQ ID NO: 28453

SEQ ID NO: 42419 - DNA, 23 bp, Homo Sapiens
tgtagcggttatcacattcgcct

SEQ ID NO: 42420 - DNA, 16 bp, Homo Sapiens
tgtagctcagtggtag

SEQ ID NO: 42421 - DNA, 17 bp, Homo Sapiens
tgtagctcagtggtaga

SEQ ID NO: 42422 - DNA, 18 bp, Homo Sapiens
tgtagctcagtggtagag

SEQ ID NO: 42423 - DNA, 16 bp, Homo Sapiens
tgtagtccgtgcgaga

SEQ ID NO: 42424 - DNA, 17 bp, Homo Sapiens
tgtagtccgtgcgagaa

SEQ ID NO: 42425 - DNA, 18 bp, Homo Sapiens
tgtagtccgtgcgagaat

SEQ ID NO: 42426 - DNA, 19 bp, Homo Sapiens
tgtagtccgtgcgagaata

SEQ ID NO: 42427 - DNA, 21 bp, Homo Sapiens
tgtagtccgtgcgagaatacc

SEQ ID NO: 42428 - DNA, 22 bp, Homo Sapiens
tgtagtccgtgcgagaatacca

SEQ ID NO: 42429 - DNA, 17 bp, Homo Sapiens
tgtagtggtatcatgca

SEQ ID NO: 42430 - DNA, 22 bp, Homo Sapiens
tgtagtggtatcatgcaagatt

SEQ ID NO: 42431 - DNA, 23 bp, Homo Sapiens
tgtagtggtcatcacgttcgcct

SEQ ID NO: 42432 - DNA, 23 bp, Homo Sapiens
tgtagtggttatcacgtctgctt

SEQ ID NO: 42433 - DNA, 22 bp, Homo Sapiens
tgtagtggttatcacgttcgcc

SEQ ID NO: 42434 - DNA, 23 bp, Homo Sapiens
tgtagtggttatcacgttcgcct

SEQ ID NO: 42435 - DNA, 36 bp, Homo Sapiens; identical to SEQ ID NO: 28531

SEQ ID NO: 42436 - DNA, 37 bp, Homo Sapiens; identical to SEQ ID NO: 28532

SEQ ID NO: 42437 - DNA, 38 bp, Homo Sapiens; identical to SEQ ID NO: 28533

SEQ ID NO: 42438 - DNA, 36 bp, Homo Sapiens; identical to SEQ ID NO: 28541

SEQ ID NO: 42439 - DNA, 37 bp, Homo Sapiens; identical to SEQ ID NO: 28542

SEQ ID NO: 42440 - DNA, 38 bp, Homo Sapiens; identical to SEQ ID NO: 28543

SEQ ID NO: 42441 - DNA, 17 bp, Homo Sapiens
tgtcacgcgggagaccg

SEQ ID NO: 42442 - DNA, 41 bp, Homo Sapiens; identical to SEQ ID NO: 28550

SEQ ID NO: 42443 - DNA, 41 bp, Homo Sapiens; identical to SEQ ID NO: 28557

SEQ ID NO: 42444 - DNA, 42 bp, Homo Sapiens; identical to SEQ ID NO: 28558

SEQ ID NO: 42445 - DNA, 43 bp, Homo Sapiens; identical to SEQ ID NO: 28559

SEQ ID NO: 42446 - DNA, 16 bp, Homo Sapiens
tgtccgcgtgggttcg

SEQ ID NO: 42447 - DNA, 29 bp, Homo Sapiens
tgtccgcgtgggttcgaaccccactcctg

SEQ ID NO: 42448 - DNA, 41 bp, Homo Sapiens; identical to SEQ ID NO: 28601

SEQ ID NO: 42449 - DNA, 42 bp, Homo Sapiens; identical to SEQ ID NO: 28602

SEQ ID NO: 42450 - DNA, 43 bp, Homo Sapiens; identical to SEQ ID NO: 28603

SEQ ID NO: 42451 - DNA, 36 bp, Homo Sapiens
tgtgagaggtcccgggttcaaatcccggacgagccc

SEQ ID NO: 42452 - DNA, 37 bp, Homo Sapiens
tgtgagaggtcccgggttcaaatcccggacgagcccc

SEQ ID NO: 42453 - DNA, 28 bp, Homo Sapiens
tgtgagttcgagcctcacctggagcacc

SEQ ID NO: 42454 - DNA, 20 bp, Homo Sapiens
tgtgctttgcacgcgtgggt

SEQ ID NO: 42455 - DNA, 41 bp, Homo Sapiens; identical to SEQ ID NO: 28610

SEQ ID NO: 42456 - DNA, 27 bp, Homo Sapiens
tgtgggttcgaatcccaccagagtcgc

SEQ ID NO: 42457 - DNA, 28 bp, Homo Sapiens
tgtgggttcgaatcccaccagagtcgcc

SEQ ID NO: 42458 - DNA, 27 bp, Homo Sapiens
tgtgggttcgagtcccaccagagtcgc

SEQ ID NO: 42459 - DNA, 28 bp, Homo Sapiens
tgtgggttcgagtcccaccagagtcgcc

SEQ ID NO: 42460 - DNA, 26 bp, Homo Sapiens
tgtgggttcgagtcccatctggggtg

SEQ ID NO: 42461 - DNA, 26 bp, Homo Sapiens
tgtgggttcgagtcccatctgggtcg

SEQ ID NO: 42462 - DNA, 27 bp, Homo Sapiens
tgtgggttcgagtcccatctgggtcgc

SEQ ID NO: 42463 - DNA, 28 bp, Homo Sapiens
tgtgggttcgagtcccatctgggtcgcc

SEQ ID NO: 42464 - DNA, 27 bp, Homo Sapiens
tgtgggtttaagtcccattggtctagc

SEQ ID NO: 42465 - DNA, 28 bp, Homo Sapiens
tgtgggtttaagtcccattggtctagcc

SEQ ID NO: 42466 - DNA, 42 bp, Homo Sapiens; identical to SEQ ID NO: 28651

SEQ ID NO: 42467 - DNA, 22 bp, Homo Sapiens
tgttcaaatcacgtcggggtca

SEQ ID NO: 42468 - DNA, 23 bp, Homo Sapiens
tgttcaaatcacgtcggggtcac

SEQ ID NO: 42469 - DNA, 24 bp, Homo Sapiens
tgttcaaatcacgtcggggtcacc

SEQ ID NO: 42470 - DNA, 22 bp, Homo Sapiens
tgttcaagtcacgtcggggtca

SEQ ID NO: 42471 - DNA, 23 bp, Homo Sapiens
tgttcaagtcacgtcggggtcac

SEQ ID NO: 42472 - DNA, 24 bp, Homo Sapiens
tgttcaagtcacgtcggggtcacc

SEQ ID NO: 42473 - DNA, 22 bp, Homo Sapiens
tgttcgaatcacgtcggggtca

SEQ ID NO: 42474 - DNA, 23 bp, Homo Sapiens
tgttcgaatcacgtcggggtcac

SEQ ID NO: 42475 - DNA, 24 bp, Homo Sapiens
tgttcgaatcacgtcggggtcacc

SEQ ID NO: 42476 - DNA, 25 bp, Homo Sapiens
tgttggttatacccttcccgtacta

SEQ ID NO: 42477 - DNA, 27 bp, Homo Sapiens
tgttggttatacccttcccgtactacc

SEQ ID NO: 42478 - DNA, 28 bp, Homo Sapiens
tgttggttatacccttcccgtactacca

SEQ ID NO: 42479 - DNA, 16 bp, Homo Sapiens
tgtttagacgggctca

SEQ ID NO: 42480 - DNA, 17 bp, Homo Sapiens
tgtttagacgggctcac

SEQ ID NO: 42481 - DNA, 18 bp, Homo Sapiens
tgtttagacgggctcaca

SEQ ID NO: 42482 - DNA, 23 bp, Homo Sapiens
tgtttagacgggctcacatcacc

SEQ ID NO: 42483 - DNA, 24 bp, Homo Sapiens
tgtttagacgggctcacatcaccc

SEQ ID NO: 42484 - DNA, 25 bp, Homo Sapiens
tgtttagacgggctcacatcacccc

SEQ ID NO: 42485 - DNA, 26 bp, Homo Sapiens
tgtttagacgggctcacatcacccca

SEQ ID NO: 42486 - DNA, 28 bp, Homo Sapiens
tgtttagacgggctcacatcaccccata

SEQ ID NO: 42487 - DNA, 29 bp, Homo Sapiens
tgtttagacgggctcacatcaccccataa

SEQ ID NO: 42488 - DNA, 34 bp, Homo Sapiens; identical to SEQ ID NO: 28695

SEQ ID NO: 42489 - DNA, 35 bp, Homo Sapiens; identical to SEQ ID NO: 28696

SEQ ID NO: 42490 - DNA, 34 bp, Homo Sapiens; identical to SEQ ID NO: 28697

SEQ ID NO: 42491 - DNA, 31 bp, Homo Sapiens; identical to SEQ ID NO: 28706

SEQ ID NO: 42492 - DNA, 32 bp, Homo Sapiens; identical to SEQ ID NO: 28707

SEQ ID NO: 42493 - DNA, 33 bp, Homo Sapiens; identical to SEQ ID NO: 28708

SEQ ID NO: 42494 - DNA, 22 bp, Homo Sapiens
ttaaacccccttatttctacca

SEQ ID NO: 42495 - DNA, 19 bp, Homo Sapiens
ttaaagactttttctctga

SEQ ID NO: 42496 - DNA, 20 bp, Homo Sapiens
ttaaagactttttctctgac

SEQ ID NO: 42497 - DNA, 21 bp, Homo Sapiens
ttaaagactttttctctgacc

SEQ ID NO: 42498 - DNA, 22 bp, Homo Sapiens
ttaaagactttttctctgacca

SEQ ID NO: 42499 - DNA, 18 bp, Homo Sapiens
ttaaagattaagagaacc

SEQ ID NO: 42500 - DNA, 37 bp, Homo Sapiens; identical to SEQ ID NO: 28754

SEQ ID NO: 42501 - DNA, 38 bp, Homo Sapiens; identical to SEQ ID NO: 28755

SEQ ID NO: 42502 - DNA, 39 bp, Homo Sapiens; identical to SEQ ID NO: 28756

SEQ ID NO: 42503 - DNA, 27 bp, Homo Sapiens
ttaaaggataacagctatccattggtc

SEQ ID NO: 42504 - DNA, 18 bp, Homo Sapiens
ttaaagtggctgatttgc

SEQ ID NO: 42505 - DNA, 22 bp, Homo Sapiens
ttaaagtggctgatttgcgttc

SEQ ID NO: 42506 - DNA, 25 bp, Homo Sapiens
ttaaccaaaacatcagattgtgaat

SEQ ID NO: 42507 - DNA, 26 bp, Homo Sapiens
ttaaccaaaacatcagattgtgaatc

SEQ ID NO: 42508 - DNA, 21 bp, Homo Sapiens
ttaaccgaaaggttggtggtt

SEQ ID NO: 42509 - DNA, 22 bp, Homo Sapiens
ttaaccgaaaggttggtggttc

SEQ ID NO: 42510 - DNA, 23 bp, Homo Sapiens
ttaaccgaaaggttggtggttcg

SEQ ID NO: 42511 - DNA, 24 bp, Homo Sapiens
ttaaccgaaaggttggtggttcga

SEQ ID NO: 42512 - DNA, 38 bp, Homo Sapiens; identical to SEQ ID NO: 28874

SEQ ID NO: 42513 - DNA, 39 bp, Homo Sapiens; identical to SEQ ID NO: 28875

SEQ ID NO: 42514 - DNA, 40 bp, Homo Sapiens; identical to SEQ ID NO: 28876

SEQ ID NO: 42515 - DNA, 41 bp, Homo Sapiens; identical to SEQ ID NO: 28877

SEQ ID NO: 42516 - DNA, 42 bp, Homo Sapiens; identical to SEQ ID NO: 28878

SEQ ID NO: 42517 - DNA, 40 bp, Homo Sapiens
ttaaccgaaaggttggtggttcgatcccacccagggacgc

SEQ ID NO: 42518 - DNA, 41 bp, Homo Sapiens; identical to SEQ ID NO: 28879

SEQ ID NO: 42519 - DNA, 31 bp, Homo Sapiens; identical to SEQ ID NO: 28884

SEQ ID NO: 42520 - DNA, 22 bp, Homo Sapiens
ttaactaagtgtttgtgggttt

SEQ ID NO: 42521 - DNA, 32 bp, Homo Sapiens; identical to SEQ ID NO: 28902

SEQ ID NO: 42522 - DNA, 36 bp, Homo Sapiens; identical to SEQ ID NO: 28906

SEQ ID NO: 42523 - DNA, 37 bp, Homo Sapiens; identical to SEQ ID NO: 28907

SEQ ID NO: 42524 - DNA, 38 bp, Homo Sapiens; identical to SEQ ID NO: 28908

SEQ ID NO: 42525 - DNA, 39 bp, Homo Sapiens; identical to SEQ ID NO: 28909

SEQ ID NO: 42526 - DNA, 40 bp, Homo Sapiens; identical to SEQ ID NO: 28910

SEQ ID NO: 42527 - DNA, 41 bp, Homo Sapiens; identical to SEQ ID NO: 28911

SEQ ID NO: 42528 - DNA, 42 bp, Homo Sapiens; identical to SEQ ID NO: 28912

SEQ ID NO: 42529 - DNA, 26 bp, Homo Sapiens
ttaacttccaattaactagttttgac

SEQ ID NO: 42530 - DNA, 17 bp, Homo Sapiens
ttaacttgaccgctctg

SEQ ID NO: 42531 - DNA, 18 bp, Homo Sapiens
ttaacttgaccgctctga

SEQ ID NO: 42532 - DNA, 19 bp, Homo Sapiens
ttaacttgaccgctctgac

SEQ ID NO: 42533 - DNA, 20 bp, Homo Sapiens
ttaacttgaccgctctgacc

SEQ ID NO: 42534 - DNA, 21 bp, Homo Sapiens
ttaacttgaccgctctgacca

SEQ ID NO: 42535 - DNA, 30 bp, Homo Sapiens; identical to SEQ ID NO: 28943

SEQ ID NO: 42536 - DNA, 31 bp, Homo Sapiens; identical to SEQ ID NO: 28944

SEQ ID NO: 42537 - DNA, 32 bp, Homo Sapiens; identical to SEQ ID NO: 28945

SEQ ID NO: 42538 - DNA, 18 bp, Homo Sapiens
ttaagatccaatggacat

SEQ ID NO: 42539 - DNA, 16 bp, Homo Sapiens
ttaagatggcagagcc

SEQ ID NO: 42540 - DNA, 17 bp, Homo Sapiens
ttaagatggcagagccc

SEQ ID NO: 42541 - DNA, 20 bp, Homo Sapiens
ttaagtcccattggtctagc

SEQ ID NO: 42542 - DNA, 23 bp, Homo Sapiens
ttaagttaaagattaagagaacc

SEQ ID NO: 42543 - DNA, 35 bp, Homo Sapiens; identical to SEQ ID NO: 28994

SEQ ID NO: 42544 - DNA, 41 bp, Homo Sapiens; identical to SEQ ID NO: 28999

SEQ ID NO: 42545 - DNA, 42 bp, Homo Sapiens; identical to SEQ ID NO: 29000

SEQ ID NO: 42546 - DNA, 43 bp, Homo Sapiens; identical to SEQ ID NO: 29001

SEQ ID NO: 42547 - DNA, 44 bp, Homo Sapiens; identical to SEQ ID NO: 29002

SEQ ID NO: 42548 - DNA, 16 bp, Homo Sapiens
ttaatcccagggtcgt

SEQ ID NO: 42549 - DNA, 16 bp, Homo Sapiens
ttaatctcagggtcgt

SEQ ID NO: 42550 - DNA, 41 bp, Homo Sapiens; identical to SEQ ID NO: 29015

SEQ ID NO: 42551 - DNA, 22 bp, Homo Sapiens
ttaatctgagggtccagggttc

SEQ ID NO: 42552 - DNA, 42 bp, Homo Sapiens; identical to SEQ ID NO: 29027

SEQ ID NO: 42553 - DNA, 17 bp, Homo Sapiens
ttaattaaagtggctga

SEQ ID NO: 42554 - DNA, 18 bp, Homo Sapiens
ttaattaaagtggctgat

SEQ ID NO: 42555 - DNA, 19 bp, Homo Sapiens
ttacacgcagaaggtcctg

SEQ ID NO: 42556 - DNA, 42 bp, Homo Sapiens
ttacacgcagaaggtcctgggttcgagccccagtggaaccac

SEQ ID NO: 42557 - DNA, 43 bp, Homo Sapiens; identical to SEQ ID NO: 29038

SEQ ID NO: 42558 - DNA, 21 bp, Homo Sapiens
ttacacttaggagatttcaac

SEQ ID NO: 42559 - DNA, 38 bp, Homo Sapiens; identical to SEQ ID NO: 29061

SEQ ID NO: 42560 - DNA, 39 bp, Homo Sapiens; identical to SEQ ID NO: 29062

SEQ ID NO: 42561 - DNA, 40 bp, Homo Sapiens; identical to SEQ ID NO: 29063

SEQ ID NO: 42562 - DNA, 41 bp, Homo Sapiens; identical to SEQ ID NO: 29064

SEQ ID NO: 42563 - DNA, 42 bp, Homo Sapiens; identical to SEQ ID NO: 29065

SEQ ID NO: 42564 - DNA, 16 bp, Homo Sapiens
ttacagtcagaggttc

SEQ ID NO: 42565 - DNA, 21 bp, Homo Sapiens
ttacgaccccttatttacccc

SEQ ID NO: 42566 - DNA, 22 bp, Homo Sapiens
ttacgaccccttatttacccca

SEQ ID NO: 42567 - DNA, 17 bp, Homo Sapiens
ttagaatcttagctttg

SEQ ID NO: 42568 - DNA, 41 bp, Homo Sapiens; identical to SEQ ID NO: 29120

SEQ ID NO: 42569 - DNA, 20 bp, Homo Sapiens
ttagacgggctcacatcacc

SEQ ID NO: 42570 - DNA, 21 bp, Homo Sapiens
ttagacgggctcacatcaccc

SEQ ID NO: 42571 - DNA, 23 bp, Homo Sapiens
ttagacgggctcacatcacccca

SEQ ID NO: 42572 - DNA, 28 bp, Homo Sapiens
ttagacgggctcacatcaccccataaac

SEQ ID NO: 42573 - DNA, 29 bp, Homo Sapiens
ttagacgggctcacatcaccccataaaca

SEQ ID NO: 42574 - DNA, 31 bp, Homo Sapiens; identical to SEQ ID NO: 29141

SEQ ID NO: 42575 - DNA, 32 bp, Homo Sapiens; identical to SEQ ID NO: 29142

SEQ ID NO: 42576 - DNA, 23 bp, Homo Sapiens
ttagagccagactgcctgggttt

SEQ ID NO: 42577 - DNA, 16 bp, Homo Sapiens
ttagcactctggactc

SEQ ID NO: 42578 - DNA, 17 bp, Homo Sapiens
ttagcactctggactct

SEQ ID NO: 42579 - DNA, 18 bp, Homo Sapiens
ttagcactctggactctg

SEQ ID NO: 42580 - DNA, 19 bp, Homo Sapiens
ttagcactctggactctga

SEQ ID NO: 42581 - DNA, 20 bp, Homo Sapiens
ttagcactctggactctgaa

SEQ ID NO: 42582 - DNA, 21 bp, Homo Sapiens
ttagcactctggactctgaat

SEQ ID NO: 42583 - DNA, 22 bp, Homo Sapiens
ttagcactctggactctgaatc

SEQ ID NO: 42584 - DNA, 23 bp, Homo Sapiens
ttagcactctggactctgaatcc

SEQ ID NO: 42585 - DNA, 24 bp, Homo Sapiens
ttagcactctggactctgaatcca

SEQ ID NO: 42586 - DNA, 25 bp, Homo Sapiens
ttagcactctggactctgaatccag

SEQ ID NO: 42587 - DNA, 26 bp, Homo Sapiens
ttagcactctggactctgaatccagc

SEQ ID NO: 42588 - DNA, 27 bp, Homo Sapiens
ttagcactctggactctgaatccagcg

SEQ ID NO: 42589 - DNA, 31 bp, Homo Sapiens; identical to SEQ ID NO: 29166

SEQ ID NO: 42590 - DNA, 32 bp, Homo Sapiens; identical to SEQ ID NO: 29167

SEQ ID NO: 42591 - DNA, 33 bp, Homo Sapiens; identical to SEQ ID NO: 29168

SEQ ID NO: 42592 - DNA, 34 bp, Homo Sapiens; identical to SEQ ID NO: 29169

SEQ ID NO: 42593 - DNA, 35 bp, Homo Sapiens; identical to SEQ ID NO: 29170

SEQ ID NO: 42594 - DNA, 37 bp, Homo Sapiens; identical to SEQ ID NO: 29172

SEQ ID NO: 42595 - DNA, 38 bp, Homo Sapiens; identical to SEQ ID NO: 29173

SEQ ID NO: 42596 - DNA, 46 bp, Homo Sapiens; identical to SEQ ID NO: 29176

SEQ ID NO: 42597 - DNA, 17 bp, Homo Sapiens
ttagcactctggacttt

SEQ ID NO: 42598 - DNA, 18 bp, Homo Sapiens
ttagcactctggactttg

SEQ ID NO: 42599 - DNA, 19 bp, Homo Sapiens
ttagcactctggactttga

SEQ ID NO: 42600 - DNA, 20 bp, Homo Sapiens
ttagcactctggactttgaa

SEQ ID NO: 42601 - DNA, 21 bp, Homo Sapiens
ttagcactctggactttgaat

SEQ ID NO: 42602 - DNA, 22 bp, Homo Sapiens
ttagcactctggactttgaatc

SEQ ID NO: 42603 - DNA, 23 bp, Homo Sapiens
ttagcactctggactttgaatcc

SEQ ID NO: 42604 - DNA, 24 bp, Homo Sapiens
ttagcactctggactttgaatcca

SEQ ID NO: 42605 - DNA, 34 bp, Homo Sapiens; identical to SEQ ID NO: 29188

SEQ ID NO: 42606 - DNA, 21 bp, Homo Sapiens
ttagcggtagagcatttgact

SEQ ID NO: 42607 - DNA, 47 bp, Homo Sapiens; identical to SEQ ID NO: 29230

SEQ ID NO: 42608 - DNA, 33 bp, Homo Sapiens; identical to SEQ ID NO: 29238

SEQ ID NO: 42609 - DNA, 45 bp, Homo Sapiens; identical to SEQ ID NO: 29244

SEQ ID NO: 42610 - DNA, 46 bp, Homo Sapiens; identical to SEQ ID NO: 29245

SEQ ID NO: 42611 - DNA, 32 bp, Homo Sapiens; identical to SEQ ID NO: 29262

SEQ ID NO: 42612 - DNA, 33 bp, Homo Sapiens; identical to SEQ ID NO: 29263

SEQ ID NO: 42613 - DNA, 34 bp, Homo Sapiens; identical to SEQ ID NO: 29264

SEQ ID NO: 42614 - DNA, 35 bp, Homo Sapiens; identical to SEQ ID NO: 29265

SEQ ID NO: 42615 - DNA, 36 bp, Homo Sapiens; identical to SEQ ID NO: 29266

SEQ ID NO: 42616 - DNA, 17 bp, Homo Sapiens
ttaggattcctggtttt

SEQ ID NO: 42617 - DNA, 25 bp, Homo Sapiens
ttaggattcctggttttcacccagg

SEQ ID NO: 42618 - DNA, 27 bp, Homo Sapiens
ttaggattcctggttttcacccaggtg

SEQ ID NO: 42619 - DNA, 16 bp, Homo Sapiens
ttaggattcggcgctc

SEQ ID NO: 42620 - DNA, 17 bp, Homo Sapiens
ttaggattcggcgctct

SEQ ID NO: 42621 - DNA, 18 bp, Homo Sapiens
ttaggattcggcgctctc

SEQ ID NO: 42622 - DNA, 21 bp, Homo Sapiens
ttaggattcggcgctctcacc

SEQ ID NO: 42623 - DNA, 22 bp, Homo Sapiens
ttaggattcggcgctctcaccg

SEQ ID NO: 42624 - DNA, 23 bp, Homo Sapiens
ttaggattcggcgctctcaccgc

SEQ ID NO: 42625 - DNA, 24 bp, Homo Sapiens
ttaggattcggcgctctcaccgcc

SEQ ID NO: 42626 - DNA, 30 bp, Homo Sapiens; identical to SEQ ID NO: 29291

SEQ ID NO: 42627 - DNA, 31 bp, Homo Sapiens; identical to SEQ ID NO: 29292

SEQ ID NO: 42628 - DNA, 34 bp, Homo Sapiens; identical to SEQ ID NO: 29295

SEQ ID NO: 42629 - DNA, 37 bp, Homo Sapiens; identical to SEQ ID NO: 29298

SEQ ID NO: 42630 - DNA, 20 bp, Homo Sapiens
ttaggcctctttttaccacc

SEQ ID NO: 42631 - DNA, 33 bp, Homo Sapiens; identical to SEQ ID NO: 29341

SEQ ID NO: 42632 - DNA, 34 bp, Homo Sapiens; identical to SEQ ID NO: 29342

SEQ ID NO: 42633 - DNA, 33 bp, Homo Sapiens; identical to SEQ ID NO: 29345

SEQ ID NO: 42634 - DNA, 34 bp, Homo Sapiens; identical to SEQ ID NO: 29346

SEQ ID NO: 42635 - DNA, 33 bp, Homo Sapiens; identical to SEQ ID NO: 29351

SEQ ID NO: 42636 - DNA, 34 bp, Homo Sapiens; identical to SEQ ID NO: 29352

SEQ ID NO: 42637 - DNA, 16 bp, Homo Sapiens
ttagtactctgcgttg

SEQ ID NO: 42638 - DNA, 17 bp, Homo Sapiens
ttagtactctgcgttgt

SEQ ID NO: 42639 - DNA, 21 bp, Homo Sapiens
ttagtactctgcgttgtggcc

SEQ ID NO: 42640 - DNA, 22 bp, Homo Sapiens
ttagtactctgcgttgtggccg

SEQ ID NO: 42641 - DNA, 20 bp, Homo Sapiens
ttagtggtagaattctcgcc

SEQ ID NO: 42642 - DNA, 21 bp, Homo Sapiens
ttagtggtagaattctcgcct

SEQ ID NO: 42643 - DNA, 21 bp, Homo Sapiens
ttatacccttcccgtactacc

SEQ ID NO: 42644 - DNA, 22 bp, Homo Sapiens
ttatacccttcccgtactacca

SEQ ID NO: 42645 - DNA, 34 bp, Homo Sapiens
ttatcacgttcgcctcacacgcgaaaggtccccg

SEQ ID NO: 42646 - DNA, 35 bp, Homo Sapiens
ttatcacgttcgcctcacacgcgaaaggtccccgg

SEQ ID NO: 42647 - DNA, 16 bp, Homo Sapiens
ttcaaacctgccgggg

SEQ ID NO: 42648 - DNA, 17 bp, Homo Sapiens
ttcaaacctgccggggc

SEQ ID NO: 42649 - DNA, 18 bp, Homo Sapiens
ttcaaacctgccggggct

SEQ ID NO: 42650 - DNA, 19 bp, Homo Sapiens
ttcaaacctgccggggctt

SEQ ID NO: 42651 - DNA, 16 bp, Homo Sapiens
ttcaaaggttccgggt

SEQ ID NO: 42652 - DNA, 34 bp, Homo Sapiens; identical to SEQ ID NO: 29429

SEQ ID NO: 42653 - DNA, 35 bp, Homo Sapiens; identical to SEQ ID NO: 29430

SEQ ID NO: 42654 - DNA, 36 bp, Homo Sapiens; identical to SEQ ID NO: 29431

SEQ ID NO: 42655 - DNA, 37 bp, Homo Sapiens; identical to SEQ ID NO: 29432

SEQ ID NO: 42656 - DNA, 38 bp, Homo Sapiens; identical to SEQ ID NO: 29433

SEQ ID NO: 42657 - DNA, 33 bp, Homo Sapiens
ttcaaaggttgtgggttcgaatcccaccagagt

SEQ ID NO: 42658 - DNA, 34 bp, Homo Sapiens
ttcaaaggttgtgggttcgaatcccaccagagtc

SEQ ID NO: 42659 - DNA, 35 bp, Homo Sapiens
ttcaaaggttgtgggttcgaatcccaccagagtcg

SEQ ID NO: 42660 - DNA, 36 bp, Homo Sapiens
ttcaaaggttgtgggttcgaatcccaccagagtcgc

SEQ ID NO: 42661 - DNA, 37 bp, Homo Sapiens; identical to SEQ ID NO: 29434

SEQ ID NO: 42662 - DNA, 38 bp, Homo Sapiens; identical to SEQ ID NO: 29435

SEQ ID NO: 42663 - DNA, 34 bp, Homo Sapiens
ttcaaaggttgtgggttcgagtcccaccagagtc

SEQ ID NO: 42664 - DNA, 35 bp, Homo Sapiens
ttcaaaggttgtgggttcgagtcccaccagagtcg

SEQ ID NO: 42665 - DNA, 36 bp, Homo Sapiens
ttcaaaggttgtgggttcgagtcccaccagagtcgc

SEQ ID NO: 42666 - DNA, 37 bp, Homo Sapiens; identical to SEQ ID NO: 29436

SEQ ID NO: 42667 - DNA, 38 bp, Homo Sapiens; identical to SEQ ID NO: 29437

SEQ ID NO: 42668 - DNA, 20 bp, Homo Sapiens
ttcaaatcacgtcggggtca

SEQ ID NO: 42669 - DNA, 21 bp, Homo Sapiens
ttcaaatcacgtcggggtcac

SEQ ID NO: 42670 - DNA, 22 bp, Homo Sapiens
ttcaaatcacgtcggggtcacc

SEQ ID NO: 42671 - DNA, 17 bp, Homo Sapiens
ttcaaatcccggacgag

SEQ ID NO: 42672 - DNA, 18 bp, Homo Sapiens
ttcaaatcccggacgagc

SEQ ID NO: 42673 - DNA, 19 bp, Homo Sapiens
ttcaaatcccggacgagcc

SEQ ID NO: 42674 - DNA, 20 bp, Homo Sapiens
ttcaaatcccggacgagccc

SEQ ID NO: 42675 - DNA, 21 bp, Homo Sapiens
ttcaaatcccggacgagcccc

SEQ ID NO: 42676 - DNA, 22 bp, Homo Sapiens
ttcaaatcccggacgagccccc

SEQ ID NO: 42677 - DNA, 23 bp, Homo Sapiens
ttcaaatcccggacgagccccca

SEQ ID NO: 42678 - DNA, 21 bp, Homo Sapiens
ttcaaatccgggtgccccctc

SEQ ID NO: 42679 - DNA, 20 bp, Homo Sapiens
ttcaaatctcgctggggcct

SEQ ID NO: 42680 - DNA, 21 bp, Homo Sapiens
ttcaaatctcgctggggcctc

SEQ ID NO: 42681 - DNA, 22 bp, Homo Sapiens
ttcaaatctcgctggggcctcc

SEQ ID NO: 42682 - DNA, 19 bp, Homo Sapiens
ttcaaatctcggtggaacc

SEQ ID NO: 42683 - DNA, 20 bp, Homo Sapiens
ttcaaatctcggtggaacct

SEQ ID NO: 42684 - DNA, 21 bp, Homo Sapiens
ttcaaatctcggtggaacctc

SEQ ID NO: 42685 - DNA, 22 bp, Homo Sapiens
ttcaaatctcggtggaacctcc

SEQ ID NO: 42686 - DNA, 20 bp, Homo Sapiens
ttcaaatctcggtgggacct

SEQ ID NO: 42687 - DNA, 21 bp, Homo Sapiens
ttcaaatctcggtgggacctc

SEQ ID NO: 42688 - DNA, 22 bp, Homo Sapiens
ttcaaatctcggtgggacctcc

SEQ ID NO: 42689 - DNA, 21 bp, Homo Sapiens
ttcaacttaacttgaccgctc

SEQ ID NO: 42690 - DNA, 23 bp, Homo Sapiens
ttcaacttaacttgaccgctctg

SEQ ID NO: 42691 - DNA, 24 bp, Homo Sapiens
ttcaacttaacttgaccgctctga

SEQ ID NO: 42692 - DNA, 25 bp, Homo Sapiens
ttcaacttaacttgaccgctctgac

SEQ ID NO: 42693 - DNA, 26 bp, Homo Sapiens
ttcaacttaacttgaccgctctgacc

SEQ ID NO: 42694 - DNA, 27 bp, Homo Sapiens
ttcaacttaacttgaccgctctgacca

SEQ ID NO: 42695 - DNA, 20 bp, Homo Sapiens
ttcaagtcacgtcggggtca

SEQ ID NO: 42696 - DNA, 21 bp, Homo Sapiens
ttcaagtcacgtcggggtcac

SEQ ID NO: 42697 - DNA, 22 bp, Homo Sapiens
ttcaagtcacgtcggggtcacc

SEQ ID NO: 42698 - DNA, 23 bp, Homo Sapiens
ttcaagtcacgtcggggtcacca

SEQ ID NO: 42699 - DNA, 20 bp, Homo Sapiens
ttcaagtccctgttcgggcg

SEQ ID NO: 42700 - DNA, 21 bp, Homo Sapiens
ttcaagtccctgttcgggcgc

SEQ ID NO: 42701 - DNA, 23 bp, Homo Sapiens
ttcaagtccctgttcgggcgcca

SEQ ID NO: 42702 - DNA, 22 bp, Homo Sapiens
ttcaatccccggcacctccacc

SEQ ID NO: 42703 - DNA, 21 bp, Homo Sapiens
ttcaatcccgggtttcggcac

SEQ ID NO: 42704 - DNA, 21 bp, Homo Sapiens
ttcaattccccgacggggagc

SEQ ID NO: 42705 - DNA, 39 bp, Homo Sapiens; identical to SEQ ID NO: 29495

SEQ ID NO: 42706 - DNA, 40 bp, Homo Sapiens; identical to SEQ ID NO: 29496

SEQ ID NO: 42707 - DNA, 41 bp, Homo Sapiens; identical to SEQ ID NO: 29497

SEQ ID NO: 42708 - DNA, 42 bp, Homo Sapiens; identical to SEQ ID NO: 29498

SEQ ID NO: 42709 - DNA, 16 bp, Homo Sapiens
ttcaggtcgcagtctc

SEQ ID NO: 42710 - DNA, 17 bp, Homo Sapiens
ttcaggtcgcagtctcc

SEQ ID NO: 42711 - DNA, 18 bp, Homo Sapiens
ttcaggtcgcagtctccc

SEQ ID NO: 42712 - DNA, 16 bp, Homo Sapiens
ttcagtggtagaattc

SEQ ID NO: 42713 - DNA, 19 bp, Homo Sapiens
ttcagtggtagaattctcg

SEQ ID NO: 42714 - DNA, 20 bp, Homo Sapiens
ttcagtggtagaattctcgc

SEQ ID NO: 42715 - DNA, 21 bp, Homo Sapiens
ttcagtggtagaattctcgcc

SEQ ID NO: 42716 - DNA, 22 bp, Homo Sapiens
ttcagtggtagaattctcgcct

SEQ ID NO: 42717 - DNA, 26 bp, Homo Sapiens
ttcagtggtagaattctcgcctccca

SEQ ID NO: 42718 - DNA, 27 bp, Homo Sapiens
ttcagtggtagaattctcgcctcccac

SEQ ID NO: 42719 - DNA, 28 bp, Homo Sapiens
ttcagtggtagaattctcgcctcccacg

SEQ ID NO: 42720 - DNA, 23 bp, Homo Sapiens
ttcagtggtagaattctcgcctg

SEQ ID NO: 42721 - DNA, 24 bp, Homo Sapiens
ttcagtggtagaattctcgcctgc

SEQ ID NO: 42722 - DNA, 25 bp, Homo Sapiens
ttcagtggtagaattctcgcctgcc

SEQ ID NO: 42723 - DNA, 26 bp, Homo Sapiens
ttcagtggtagaattctcgcctgcca

SEQ ID NO: 42724 - DNA, 28 bp, Homo Sapiens
ttcagtggtagaattctcgcctgccacg

SEQ ID NO: 42725 - DNA, 29 bp, Homo Sapiens
ttcagtggtagaattctcgcctgccacgc

SEQ ID NO: 42726 - DNA, 33 bp, Homo Sapiens; identical to SEQ ID NO: 29526

SEQ ID NO: 42727 - DNA, 38 bp, Homo Sapiens; identical to SEQ ID NO: 29527

SEQ ID NO: 42728 - DNA, 39 bp, Homo Sapiens; identical to SEQ ID NO: 29528

SEQ ID NO: 42729 - DNA, 40 bp, Homo Sapiens; identical to SEQ ID NO: 29529

SEQ ID NO: 42730 - DNA, 42 bp, Homo Sapiens; identical to SEQ ID NO: 29531

SEQ ID NO: 42731 - DNA, 31 bp, Homo Sapiens; identical to SEQ ID NO: 29546

SEQ ID NO: 42732 - DNA, 32 bp, Homo Sapiens; identical to SEQ ID NO: 29556

SEQ ID NO: 42733 - DNA, 36 bp, Homo Sapiens; identical to SEQ ID NO: 29577

SEQ ID NO: 42734 - DNA, 37 bp, Homo Sapiens; identical to SEQ ID NO: 29578

SEQ ID NO: 42735 - DNA, 38 bp, Homo Sapiens; identical to SEQ ID NO: 29579

SEQ ID NO: 42736 - DNA, 39 bp, Homo Sapiens; identical to SEQ ID NO: 29580

SEQ ID NO: 42737 - DNA, 41 bp, Homo Sapiens; identical to SEQ ID NO: 29582

SEQ ID NO: 42738 - DNA, 42 bp, Homo Sapiens; identical to SEQ ID NO: 29583

SEQ ID NO: 42739 - DNA, 19 bp, Homo Sapiens
ttccaagcagttgacccgg

SEQ ID NO: 42740 - DNA, 16 bp, Homo Sapiens
ttccagctcgaaggac

SEQ ID NO: 42741 - DNA, 17 bp, Homo Sapiens
ttccagctcgaaggacc

SEQ ID NO: 42742 - DNA, 29 bp, Homo Sapiens
ttccaggttcgactcctggctggctcgcc

SEQ ID NO: 42743 - DNA, 34 bp, Homo Sapiens; identical to SEQ ID NO: 29622

SEQ ID NO: 42744 - DNA, 31 bp, Homo Sapiens; identical to SEQ ID NO: 29632

SEQ ID NO: 42745 - DNA, 32 bp, Homo Sapiens; identical to SEQ ID NO: 29633

SEQ ID NO: 42746 - DNA, 34 bp, Homo Sapiens; identical to SEQ ID NO: 29635

SEQ ID NO: 42747 - DNA, 31 bp, Homo Sapiens; identical to SEQ ID NO: 29645

SEQ ID NO: 42748 - DNA, 33 bp, Homo Sapiens; identical to SEQ ID NO: 29647

SEQ ID NO: 42749 - DNA, 27 bp, Homo Sapiens
ttccatggtgtaatggttagcactctg

SEQ ID NO: 42750 - DNA, 28 bp, Homo Sapiens
ttccatggtgtaatggttagcactctgg

SEQ ID NO: 42751 - DNA, 29 bp, Homo Sapiens
ttccatggtgtaatggttagcactctgga

SEQ ID NO: 42752 - DNA, 31 bp, Homo Sapiens; identical to SEQ ID NO: 29658

SEQ ID NO: 42753 - DNA, 32 bp, Homo Sapiens; identical to SEQ ID NO: 29659

SEQ ID NO: 42754 - DNA, 33 bp, Homo Sapiens; identical to SEQ ID NO: 29660

SEQ ID NO: 42755 - DNA, 34 bp, Homo Sapiens; identical to SEQ ID NO: 29661

SEQ ID NO: 42756 - DNA, 35 bp, Homo Sapiens; identical to SEQ ID NO: 29662

SEQ ID NO: 42757 - DNA, 16 bp, Homo Sapiens
ttcccattcttgcgac

SEQ ID NO: 42758 - DNA, 16 bp, Homo Sapiens
ttccccgacggggagc

SEQ ID NO: 42759 - DNA, 23 bp, Homo Sapiens
ttccccgcacaggttcgaatcct

SEQ ID NO: 42760 - DNA, 35 bp, Homo Sapiens; identical to SEQ ID NO: 29703

SEQ ID NO: 42761 - DNA, 16 bp, Homo Sapiens
ttcccggccaacgcac

SEQ ID NO: 42762 - DNA, 17 bp, Homo Sapiens
ttcccggccaacgcacc

SEQ ID NO: 42763 - DNA, 18 bp, Homo Sapiens
ttcccggccaacgcacca

SEQ ID NO: 42764 - DNA, 16 bp, Homo Sapiens
ttcccggccaatgcac

SEQ ID NO: 42765 - DNA, 17 bp, Homo Sapiens
ttcccggccaatgcacc

SEQ ID NO: 42766 - DNA, 18 bp, Homo Sapiens
ttcccggccaatgcacca

SEQ ID NO: 42767 - DNA, 17 bp, Homo Sapiens
ttcccggccagtgcacc

SEQ ID NO: 42768 - DNA, 18 bp, Homo Sapiens
ttcccggccagtgcacca

SEQ ID NO: 42769 - DNA, 16 bp, Homo Sapiens
ttcccggcccatgcac

SEQ ID NO: 42770 - DNA, 17 bp, Homo Sapiens
ttcccggcccatgcacc

SEQ ID NO: 42771 - DNA, 18 bp, Homo Sapiens
ttcccggcccatgcacca

SEQ ID NO: 42772 - DNA, 16 bp, Homo Sapiens
ttcccgggcggcgcac

SEQ ID NO: 42773 - DNA, 17 bp, Homo Sapiens
ttcccgggcggcgcacc

SEQ ID NO: 42774 - DNA, 18 bp, Homo Sapiens
ttcccgggcggcgcacca

SEQ ID NO: 42775 - DNA, 16 bp, Homo Sapiens
ttcccggtcagggaac

SEQ ID NO: 42776 - DNA, 17 bp, Homo Sapiens
ttcccggtcagggaacc

SEQ ID NO: 42777 - DNA, 16 bp, Homo Sapiens
ttcccggtcatggaac

SEQ ID NO: 42778 - DNA, 17 bp, Homo Sapiens
ttcccggtcatggaacc

SEQ ID NO: 42779 - DNA, 34 bp, Homo Sapiens; identical to SEQ ID NO: 29726

SEQ ID NO: 42780 - DNA, 18 bp, Homo Sapiens
ttccggatcagaagattg

SEQ ID NO: 42781 - DNA, 19 bp, Homo Sapiens
ttccggatcagaagattga

SEQ ID NO: 42782 - DNA, 20 bp, Homo Sapiens
ttccggatcagaagattgag

SEQ ID NO: 42783 - DNA, 21 bp, Homo Sapiens
ttccggatcagaagattgagg

SEQ ID NO: 42784 - DNA, 22 bp, Homo Sapiens
ttccggatcagaagattgaggg

SEQ ID NO: 42785 - DNA, 23 bp, Homo Sapiens
ttccggatcagaagattgagggt

SEQ ID NO: 42786 - DNA, 33 bp, Homo Sapiens; identical to SEQ ID NO: 29741

SEQ ID NO: 42787 - DNA, 44 bp, Homo Sapiens; identical to SEQ ID NO: 29744

SEQ ID NO: 42788 - DNA, 16 bp, Homo Sapiens
ttccggctcgaaggac

SEQ ID NO: 42789 - DNA, 17 bp, Homo Sapiens
ttccggctcgaaggacc

SEQ ID NO: 42790 - DNA, 18 bp, Homo Sapiens
ttccggctcgaaggacca

SEQ ID NO: 42791 - DNA, 26 bp, Homo Sapiens
ttccgggttcgagtcccggcggagtc

SEQ ID NO: 42792 - DNA, 27 bp, Homo Sapiens
ttccgggttcgagtcccggcggagtcg

SEQ ID NO: 42793 - DNA, 28 bp, Homo Sapiens
ttccgggttcgagtcccggcggagtcgc

SEQ ID NO: 42794 - DNA, 29 bp, Homo Sapiens
ttccgggttcgagtcccggcggagtcgcc

SEQ ID NO: 42795 - DNA, 31 bp, Homo Sapiens; identical to SEQ ID NO: 29766

SEQ ID NO: 42796 - DNA, 21 bp, Homo Sapiens
ttccgtagtgtagtggtcatc

SEQ ID NO: 42797 - DNA, 30 bp, Homo Sapiens; identical to SEQ ID NO: 29780

SEQ ID NO: 42798 - DNA, 31 bp, Homo Sapiens; identical to SEQ ID NO: 29781

SEQ ID NO: 42799 - DNA, 21 bp, Homo Sapiens
ttccgtagtgtagtggttatc

SEQ ID NO: 42800 - DNA, 22 bp, Homo Sapiens
ttccgtagtgtagtggttatca

SEQ ID NO: 42801 - DNA, 27 bp, Homo Sapiens
ttccgtagtgtagtggttatcacgttc

SEQ ID NO: 42802 - DNA, 29 bp, Homo Sapiens
ttccgtagtgtagtggttatcacgttcgc

SEQ ID NO: 42803 - DNA, 30 bp, Homo Sapiens; identical to SEQ ID NO: 29794

SEQ ID NO: 42804 - DNA, 31 bp, Homo Sapiens; identical to SEQ ID NO: 29795

SEQ ID NO: 42805 - DNA, 32 bp, Homo Sapiens; identical to SEQ ID NO: 29799

SEQ ID NO: 42806 - DNA, 33 bp, Homo Sapiens; identical to SEQ ID NO: 29800

SEQ ID NO: 42807 - DNA, 34 bp, Homo Sapiens; identical to SEQ ID NO: 29801

SEQ ID NO: 42808 - DNA, 17 bp, Homo Sapiens
ttcctcttcttaacacc

SEQ ID NO: 42809 - DNA, 16 bp, Homo Sapiens
ttcctggtcagggaac

SEQ ID NO: 42810 - DNA, 18 bp, Homo Sapiens
ttccttccttttttgcca

SEQ ID NO: 42811 - DNA, 21 bp, Homo Sapiens
ttcgaaaccgggcagaagcac

SEQ ID NO: 42812 - DNA, 22 bp, Homo Sapiens
ttcgaaaccgggcagaagcacc

SEQ ID NO: 42813 - DNA, 16 bp, Homo Sapiens
ttcgaaaccgggcgga

SEQ ID NO: 42814 - DNA, 17 bp, Homo Sapiens
ttcgaaaccgggcggaa

SEQ ID NO: 42815 - DNA, 18 bp, Homo Sapiens
ttcgaaaccgggcggaaa

SEQ ID NO: 42816 - DNA, 20 bp, Homo Sapiens
ttcgaaaccgggcggaaaca

SEQ ID NO: 42817 - DNA, 21 bp, Homo Sapiens
ttcgaaaccgggcggaaacac

SEQ ID NO: 42818 - DNA, 22 bp, Homo Sapiens
ttcgaaaccgggcggaaacacc

SEQ ID NO: 42819 - DNA, 20 bp, Homo Sapiens
ttcgaaccccgtccgtgcct

SEQ ID NO: 42820 - DNA, 21 bp, Homo Sapiens
ttcgaaccccgtccgtgcctc

SEQ ID NO: 42821 - DNA, 22 bp, Homo Sapiens
ttcgaaccctgctcgctgcgcc

SEQ ID NO: 42822 - DNA, 32 bp, Homo Sapiens; identical to SEQ ID NO: 29841

SEQ ID NO: 42823 - DNA, 33 bp, Homo Sapiens; identical to SEQ ID NO: 29842

SEQ ID NO: 42824 - DNA, 36 bp, Homo Sapiens; identical to SEQ ID NO: 29845

SEQ ID NO: 42825 - DNA, 17 bp, Homo Sapiens
ttcgaatcacgtcgggg

SEQ ID NO: 42826 - DNA, 20 bp, Homo Sapiens
ttcgaatcacgtcggggtca

SEQ ID NO: 42827 - DNA, 21 bp, Homo Sapiens
ttcgaatcacgtcggggtcac

SEQ ID NO: 42828 - DNA, 22 bp, Homo Sapiens
ttcgaatcacgtcggggtcacc

SEQ ID NO: 42829 - DNA, 23 bp, Homo Sapiens
ttcgaatcacgtcggggtcacca

SEQ ID NO: 42830 - DNA, 22 bp, Homo Sapiens
ttcgaatcccaccgctgccacc

SEQ ID NO: 42831 - DNA, 22 bp, Homo Sapiens
ttcgaatcccactcctgacacc

SEQ ID NO: 42832 - DNA, 20 bp, Homo Sapiens
ttcgaatcccacttctgaca

SEQ ID NO: 42833 - DNA, 21 bp, Homo Sapiens
ttcgaatcccacttctgacac

SEQ ID NO: 42834 - DNA, 22 bp, Homo Sapiens
ttcgaatcccacttctgacacc

SEQ ID NO: 42835 - DNA, 21 bp, Homo Sapiens
ttcgaatcccagcggggcctc

SEQ ID NO: 42836 - DNA, 22 bp, Homo Sapiens
ttcgaatcccagcggggcctcc

SEQ ID NO: 42837 - DNA, 17 bp, Homo Sapiens
ttcgaatcccagcggtg

SEQ ID NO: 42838 - DNA, 20 bp, Homo Sapiens
ttcgaatcccagcggtgcct

SEQ ID NO: 42839 - DNA, 21 bp, Homo Sapiens
ttcgaatcccagcggtgcctc

SEQ ID NO: 42840 - DNA, 22 bp, Homo Sapiens
ttcgaatcccagcggtgcctcc

SEQ ID NO: 42841 - DNA, 21 bp, Homo Sapiens
ttcgaatcccagtagagcctc

SEQ ID NO: 42842 - DNA, 22 bp, Homo Sapiens
ttcgaatcccagtagagcctcc

SEQ ID NO: 42843 - DNA, 21 bp, Homo Sapiens
ttcgaatcccatcctcgtcgc

SEQ ID NO: 42844 - DNA, 22 bp, Homo Sapiens
ttcgaatcccatcctcgtcgcc

SEQ ID NO: 42845 - DNA, 21 bp, Homo Sapiens
ttcgaatccgagtcacggcac

SEQ ID NO: 42846 - DNA, 22 bp, Homo Sapiens
ttcgaatccgagtcacggcacc

SEQ ID NO: 42847 - DNA, 21 bp, Homo Sapiens
ttcgaatccggctcgaaggac

SEQ ID NO: 42848 - DNA, 22 bp, Homo Sapiens
ttcgaatccggctcgaaggacc

SEQ ID NO: 42849 - DNA, 21 bp, Homo Sapiens
ttcgaatccggctcggaggac

SEQ ID NO: 42850 - DNA, 22 bp, Homo Sapiens
ttcgaatccggctcggaggacc

SEQ ID NO: 42851 - DNA, 17 bp, Homo Sapiens
ttcgaatcctgccgact

SEQ ID NO: 42852 - DNA, 20 bp, Homo Sapiens
ttcgaatcctgccgactacg

SEQ ID NO: 42853 - DNA, 22 bp, Homo Sapiens
ttcgaatcctgccgactacgcc

SEQ ID NO: 42854 - DNA, 20 bp, Homo Sapiens
ttcgaatcctgttcgtgacg

SEQ ID NO: 42855 - DNA, 21 bp, Homo Sapiens
ttcgaatcctgttcgtgacgc

SEQ ID NO: 42856 - DNA, 22 bp, Homo Sapiens
ttcgaatcctgttcgtgacgcc

SEQ ID NO: 42857 - DNA, 21 bp, Homo Sapiens
ttcgaatctcggtgggacctc

SEQ ID NO: 42858 - DNA, 20 bp, Homo Sapiens
ttcgactcccggtatgggaa

SEQ ID NO: 42859 - DNA, 21 bp, Homo Sapiens
ttcgactcccggtatgggaac

SEQ ID NO: 42860 - DNA, 22 bp, Homo Sapiens
ttcgactcccggtatgggaacc

SEQ ID NO: 42861 - DNA, 16 bp, Homo Sapiens
ttcgactcccggtgtg

SEQ ID NO: 42862 - DNA, 17 bp, Homo Sapiens
ttcgactcccggtgtgg

SEQ ID NO: 42863 - DNA, 18 bp, Homo Sapiens
ttcgactcccggtgtggg

SEQ ID NO: 42864 - DNA, 19 bp, Homo Sapiens
ttcgactcccggtgtggga

SEQ ID NO: 42865 - DNA, 20 bp, Homo Sapiens
ttcgactcccggtgtgggaa

SEQ ID NO: 42866 - DNA, 21 bp, Homo Sapiens
ttcgactcccggtgtgggaac

SEQ ID NO: 42867 - DNA, 22 bp, Homo Sapiens
ttcgactcccggtgtgggaacc

SEQ ID NO: 42868 - DNA, 23 bp, Homo Sapiens
ttcgactcccggtgtgggaacca

SEQ ID NO: 42869 - DNA, 17 bp, Homo Sapiens
ttcgactcctggctggc

SEQ ID NO: 42870 - DNA, 20 bp, Homo Sapiens
ttcgactcctggctggctcg

SEQ ID NO: 42871 - DNA, 21 bp, Homo Sapiens
ttcgactcctggctggctcgc

SEQ ID NO: 42872 - DNA, 22 bp, Homo Sapiens
ttcgactcctggctggctcgcc

SEQ ID NO: 42873 - DNA, 23 bp, Homo Sapiens
ttcgactcctggctggctcgcca

SEQ ID NO: 42874 - DNA, 22 bp, Homo Sapiens
ttcgagcccacccagggacgcc

SEQ ID NO: 42875 - DNA, 20 bp, Homo Sapiens
ttcgagccccagtggaacca

SEQ ID NO: 42876 - DNA, 21 bp, Homo Sapiens
ttcgagccccagtggaaccac

SEQ ID NO: 42877 - DNA, 22 bp, Homo Sapiens
ttcgagccccagtggaaccacc

SEQ ID NO: 42878 - DNA, 22 bp, Homo Sapiens
ttcgagtcccatctgggtcgcc

SEQ ID NO: 42879 - DNA, 21 bp, Homo Sapiens
ttcgagtcccggcggagtcgc

SEQ ID NO: 42880 - DNA, 22 bp, Homo Sapiens
ttcgagtcccggcggagtcgcc

SEQ ID NO: 42881 - DNA, 22 bp, Homo Sapiens
ttcgagtcctgccgcggtcgcc

SEQ ID NO: 42882 - DNA, 31 bp, Homo Sapiens; identical to SEQ ID NO: 29955

SEQ ID NO: 42883 - DNA, 22 bp, Homo Sapiens
ttcgatccccagcatctccacc

SEQ ID NO: 42884 - DNA, 21 bp, Homo Sapiens
ttcgatccccggcatctccac

SEQ ID NO: 42885 - DNA, 22 bp, Homo Sapiens
ttcgatccccggcatctccacc

SEQ ID NO: 42886 - DNA, 23 bp, Homo Sapiens
ttcgatccccggcatctccacca

SEQ ID NO: 42887 - DNA, 20 bp, Homo Sapiens
ttcgatccccgtacgggcca

SEQ ID NO: 42888 - DNA, 22 bp, Homo Sapiens
ttcgatccccgtacgggccacc

SEQ ID NO: 42889 - DNA, 22 bp, Homo Sapiens
ttcgatcccgggcggaaacacc

SEQ ID NO: 42890 - DNA, 21 bp, Homo Sapiens
ttcgatcccgggtttcggcac

SEQ ID NO: 42891 - DNA, 22 bp, Homo Sapiens
ttcgatcccgggtttcggcacc

SEQ ID NO: 42892 - DNA, 20 bp, Homo Sapiens
ttcgatcctcacctggagca

SEQ ID NO: 42893 - DNA, 36 bp, Homo Sapiens; identical to SEQ ID NO: 29983

SEQ ID NO: 42894 - DNA, 16 bp, Homo Sapiens
ttcgattccccgacgg

SEQ ID NO: 42895 - DNA, 17 bp, Homo Sapiens
ttcgattccccgacggg

SEQ ID NO: 42896 - DNA, 20 bp, Homo Sapiens
ttcgattccccgacggggag

SEQ ID NO: 42897 - DNA, 21 bp, Homo Sapiens
ttcgattccccgacggggagc

SEQ ID NO: 42898 - DNA, 22 bp, Homo Sapiens
ttcgattccccgacggggagcc

SEQ ID NO: 42899 - DNA, 22 bp, Homo Sapiens
ttcgattcccggccaacgcacc

SEQ ID NO: 42900 - DNA, 20 bp, Homo Sapiens
ttcgattcccggccaatgca

SEQ ID NO: 42901 - DNA, 21 bp, Homo Sapiens
ttcgattcccggccaatgcac

SEQ ID NO: 42902 - DNA, 22 bp, Homo Sapiens
ttcgattcccggccaatgcacc

SEQ ID NO: 42903 - DNA, 16 bp, Homo Sapiens
ttcgattcccgggcgg

SEQ ID NO: 42904 - DNA, 17 bp, Homo Sapiens
ttcgattcccgggcggc

SEQ ID NO: 42905 - DNA, 21 bp, Homo Sapiens
ttcgattcccgggcggcgcac

SEQ ID NO: 42906 - DNA, 22 bp, Homo Sapiens
ttcgattcccgggcggcgcacc

SEQ ID NO: 42907 - DNA, 16 bp, Homo Sapiens
ttcgattcccggtcag

SEQ ID NO: 42908 - DNA, 17 bp, Homo Sapiens
ttcgattcccggtcagg

SEQ ID NO: 42909 - DNA, 18 bp, Homo Sapiens
ttcgattcccggtcaggg

SEQ ID NO: 42910 - DNA, 21 bp, Homo Sapiens
ttcgattcccggtcagggaac

SEQ ID NO: 42911 - DNA, 22 bp, Homo Sapiens
ttcgattcccggtcagggaacc

SEQ ID NO: 42912 - DNA, 21 bp, Homo Sapiens
ttcgattccggctcgaaggac

SEQ ID NO: 42913 - DNA, 22 bp, Homo Sapiens
ttcgattccggctcgaaggacc

SEQ ID NO: 42914 - DNA, 23 bp, Homo Sapiens
ttcgattctcatagtcctagcca

SEQ ID NO: 42915 - DNA, 36 bp, Homo Sapiens
ttcggaggcgtgggttcgaatcccaccgctgccacc

SEQ ID NO: 42916 - DNA, 43 bp, Homo Sapiens
ttcggatcagaagattgagggttcgaatcccttcgtggttgcc

SEQ ID NO: 42917 - DNA, 43 bp, Homo Sapiens; identical to SEQ ID NO: 30025

SEQ ID NO: 42918 - DNA, 16 bp, Homo Sapiens
ttcggcgctctcaccg

SEQ ID NO: 42919 - DNA, 17 bp, Homo Sapiens
ttcggcgctctcaccgc

SEQ ID NO: 42920 - DNA, 18 bp, Homo Sapiens
ttcggcgctctcaccgcc

SEQ ID NO: 42921 - DNA, 25 bp, Homo Sapiens
ttcggcgctctcaccgccgcggccc

SEQ ID NO: 42922 - DNA, 27 bp, Homo Sapiens
ttcggcgctctcaccgccgcggcccgg

SEQ ID NO: 42923 - DNA, 28 bp, Homo Sapiens
ttcggcgctctcaccgccgcggcccggg

SEQ ID NO: 42924 - DNA, 26 bp, Homo Sapiens
ttcggctgttaaccgaaaggttggtg

SEQ ID NO: 42925 - DNA, 30 bp, Homo Sapiens; identical to SEQ ID NO: 30051

SEQ ID NO: 42926 - DNA, 36 bp, Homo Sapiens
ttcgggggcgtgggttcgaatcccaccgctgccacc

SEQ ID NO: 42927 - DNA, 19 bp, Homo Sapiens
ttcgggtgcgagaggtccc

SEQ ID NO: 42928 - DNA, 20 bp, Homo Sapiens
ttcgggtgcgagaggtcccg

SEQ ID NO: 42929 - DNA, 43 bp, Homo Sapiens
ttcgggtgcgagaggtcccgggttcaaatcccggacgagcccc

SEQ ID NO: 42930 - DNA, 44 bp, Homo Sapiens; identical to SEQ ID NO: 30060

SEQ ID NO: 42931 - DNA, 43 bp, Homo Sapiens; identical to SEQ ID NO: 30064

SEQ ID NO: 42932 - DNA, 44 bp, Homo Sapiens; identical to SEQ ID NO: 30065

SEQ ID NO: 42933 - DNA, 43 bp, Homo Sapiens; identical to SEQ ID NO: 30066

SEQ ID NO: 42934 - DNA, 43 bp, Homo Sapiens
ttctaattcaaaggttgtgggttcgagtcccaccagagtcgcc

SEQ ID NO: 42935 - DNA, 26 bp, Homo Sapiens
ttctaggttcgactcctggctggctc

SEQ ID NO: 42936 - DNA, 29 bp, Homo Sapiens
ttctaggttcgactcctggctggctcgcc

SEQ ID NO: 42937 - DNA, 30 bp, Homo Sapiens; identical to SEQ ID NO: 30071

SEQ ID NO: 42938 - DNA, 16 bp, Homo Sapiens
ttctcatagtcctagc

SEQ ID NO: 42939 - DNA, 17 bp, Homo Sapiens
ttctcatagtcctagcc

SEQ ID NO: 42940 - DNA, 18 bp, Homo Sapiens
ttctcatagtcctagcca

SEQ ID NO: 42941 - DNA, 16 bp, Homo Sapiens
ttctcgcctgccacgc

SEQ ID NO: 42942 - DNA, 20 bp, Homo Sapiens
ttctcgcctgccacgcggga

SEQ ID NO: 42943 - DNA, 27 bp, Homo Sapiens
ttctcgcctgccacgcgggaggcccgg

SEQ ID NO: 42944 - DNA, 16 bp, Homo Sapiens
ttctcgctggggcctc

SEQ ID NO: 42945 - DNA, 17 bp, Homo Sapiens
ttctcgctggggcctcc

SEQ ID NO: 42946 - DNA, 16 bp, Homo Sapiens
ttctcgctttgggtgc

SEQ ID NO: 42947 - DNA, 17 bp, Homo Sapiens
ttctcgctttgggtgcg

SEQ ID NO: 42948 - DNA, 17 bp, Homo Sapiens
ttctcggtttgggtccg

SEQ ID NO: 42949 - DNA, 21 bp, Homo Sapiens
ttctggtctccaatggaggcg

SEQ ID NO: 42950 - DNA, 45 bp, Homo Sapiens
ttctggtctccaatggaggcgtgggttcgaatcccacttctgaca

SEQ ID NO: 42951 - DNA, 46 bp, Homo Sapiens
ttctggtctccaatggaggcgtgggttcgaatcccacttctgacac

SEQ ID NO: 42952 - DNA, 47 bp, Homo Sapiens; identical to SEQ ID NO: 30094

SEQ ID NO: 42953 - DNA, 22 bp, Homo Sapiens
ttctggtctccggatggaggcg

SEQ ID NO: 42954 - DNA, 46 bp, Homo Sapiens
ttctggtctccggatggaggcgtgggttcgaatcccacttctgaca

SEQ ID NO: 42955 - DNA, 47 bp, Homo Sapiens
ttctggtctccggatggaggcgtgggttcgaatcccacttctgacac

SEQ ID NO: 42956 - DNA, 30 bp, Homo Sapiens; identical to SEQ ID NO: 30105

SEQ ID NO: 42957 - DNA, 31 bp, Homo Sapiens; identical to SEQ ID NO: 30106

SEQ ID NO: 42958 - DNA, 34 bp, Homo Sapiens; identical to SEQ ID NO: 30109

SEQ ID NO: 42959 - DNA, 18 bp, Homo Sapiens
ttcttgcgacccgggttc

SEQ ID NO: 42960 - DNA, 33 bp, Homo Sapiens; identical to SEQ ID NO: 30116

SEQ ID NO: 42961 - DNA, 34 bp, Homo Sapiens; identical to SEQ ID NO: 30117

SEQ ID NO: 42962 - DNA, 35 bp, Homo Sapiens; identical to SEQ ID NO: 30118

SEQ ID NO: 42963 - DNA, 36 bp, Homo Sapiens; identical to SEQ ID NO: 30119

SEQ ID NO: 42964 - DNA, 37 bp, Homo Sapiens; identical to SEQ ID NO: 30120

SEQ ID NO: 42965 - DNA, 22 bp, Homo Sapiens
ttgaatccagcgatccgagttc

SEQ ID NO: 42966 - DNA, 43 bp, Homo Sapiens; identical to SEQ ID NO: 30151

SEQ ID NO: 42967 - DNA, 44 bp, Homo Sapiens; identical to SEQ ID NO: 30152

SEQ ID NO: 42968 - DNA, 45 bp, Homo Sapiens; identical to SEQ ID NO: 30153

SEQ ID NO: 42969 - DNA, 25 bp, Homo Sapiens
ttgacaacattcaaaaaagagtacc

SEQ ID NO: 42970 - DNA, 26 bp, Homo Sapiens
ttgacaacattcaaaaaagagtacca

SEQ ID NO: 42971 - DNA, 23 bp, Homo Sapiens
ttgacccgggttcgattcccggc

SEQ ID NO: 42972 - DNA, 24 bp, Homo Sapiens
ttgacccgggttcgattcccggcc

SEQ ID NO: 42973 - DNA, 32 bp, Homo Sapiens; identical to SEQ ID NO: 30165

SEQ ID NO: 42974 - DNA, 16 bp, Homo Sapiens
ttgaccgctctgacca

SEQ ID NO: 42975 - DNA, 23 bp, Homo Sapiens
ttgactgcagatcaagaggtccc

SEQ ID NO: 42976 - DNA, 25 bp, Homo Sapiens
ttgactgcagatcaagaggtccccg

SEQ ID NO: 42977 - DNA, 24 bp, Homo Sapiens
ttgactgcagatcaagaggtccct

SEQ ID NO: 42978 - DNA, 25 bp, Homo Sapiens
ttgactgcagatcaagaggtccctg

SEQ ID NO: 42979 - DNA, 27 bp, Homo Sapiens
ttgagggttcgaatcccttcgtggttg

SEQ ID NO: 42980 - DNA, 28 bp, Homo Sapiens
ttgagggttcgaatcccttcgtggttgc

SEQ ID NO: 42981 - DNA, 29 bp, Homo Sapiens
ttgagggttcgaatcccttcgtggttgcc

SEQ ID NO: 42982 - DNA, 27 bp, Homo Sapiens
ttgagggttcgagtcccttcgtggtcg

SEQ ID NO: 42983 - DNA, 28 bp, Homo Sapiens
ttgagggttcgagtcccttcgtggtcgc

SEQ ID NO: 42984 - DNA, 29 bp, Homo Sapiens
ttgagggttcgagtcccttcgtggtcgcc

SEQ ID NO: 42985 - DNA, 30 bp, Homo Sapiens; identical to SEQ ID NO: 30176

SEQ ID NO: 42986 - DNA, 23 bp, Homo Sapiens
ttgatagagtaaataataggagc

SEQ ID NO: 42987 - DNA, 32 bp, Homo Sapiens; identical to SEQ ID NO: 30209

SEQ ID NO: 42988 - DNA, 16 bp, Homo Sapiens
ttgattagggtgctta

SEQ ID NO: 42989 - DNA, 17 bp, Homo Sapiens
ttgattagggtgcttag

SEQ ID NO: 42990 - DNA, 18 bp, Homo Sapiens
ttgattagggtgcttagc

SEQ ID NO: 42991 - DNA, 20 bp, Homo Sapiens
ttgattagggtgcttagctg

SEQ ID NO: 42992 - DNA, 22 bp, Homo Sapiens
ttgattagggtgcttagctgtt

SEQ ID NO: 42993 - DNA, 23 bp, Homo Sapiens
ttgattagggtgcttagctgtta

SEQ ID NO: 42994 - DNA, 24 bp, Homo Sapiens
ttgattagggtgcttagctgttaa

SEQ ID NO: 42995 - DNA, 25 bp, Homo Sapiens
ttgattagggtgcttagctgttaac

SEQ ID NO: 42996 - DNA, 26 bp, Homo Sapiens
ttgattagggtgcttagctgttaact

SEQ ID NO: 42997 - DNA, 27 bp, Homo Sapiens
ttgattagggtgcttagctgttaacta

SEQ ID NO: 42998 - DNA, 28 bp, Homo Sapiens
ttgattagggtgcttagctgttaactaa

SEQ ID NO: 42999 - DNA, 31 bp, Homo Sapiens; identical to SEQ ID NO: 30232

SEQ ID NO: 43000 - DNA, 37 bp, Homo Sapiens; identical to SEQ ID NO: 30233

SEQ ID NO: 43001 - DNA, 38 bp, Homo Sapiens; identical to SEQ ID NO: 30234

SEQ ID NO: 43002 - DNA, 39 bp, Homo Sapiens; identical to SEQ ID NO: 30235

SEQ ID NO: 43003 - DNA, 40 bp, Homo Sapiens; identical to SEQ ID NO: 30236

SEQ ID NO: 43004 - DNA, 43 bp, Homo Sapiens; identical to SEQ ID NO: 30239

SEQ ID NO: 43005 - DNA, 22 bp, Homo Sapiens
ttgcaatacttaatttctgcca

SEQ ID NO: 43006 - DNA, 28 bp, Homo Sapiens
ttgcacgcgtgggttcgaatcccatcct

SEQ ID NO: 43007 - DNA, 30 bp, Homo Sapiens; identical to SEQ ID NO: 30248

SEQ ID NO: 43008 - DNA, 34 bp, Homo Sapiens; identical to SEQ ID NO: 30249

SEQ ID NO: 43009 - DNA, 35 bp, Homo Sapiens; identical to SEQ ID NO: 30250

SEQ ID NO: 43010 - DNA, 43 bp, Homo Sapiens
ttgcacgtatgaggccccgggttcaatccccggcatctccacc

SEQ ID NO: 43011 - DNA, 28 bp, Homo Sapiens
ttgcaggttcgagtcctgccgcggtcgc

SEQ ID NO: 43012 - DNA, 29 bp, Homo Sapiens
ttgcaggttcgagtcctgccgcggtcgcc

SEQ ID NO: 43013 - DNA, 16 bp, Homo Sapiens
ttgcgacccgggttcg

SEQ ID NO: 43014 - DNA, 28 bp, Homo Sapiens
ttgcgacccgggttcgattcccgggcgg

SEQ ID NO: 43015 - DNA, 29 bp, Homo Sapiens
ttgcgacccgggttcgattcccgggcggc

SEQ ID NO: 43016 - DNA, 30 bp, Homo Sapiens; identical to SEQ ID NO: 30268

SEQ ID NO: 43017 - DNA, 31 bp, Homo Sapiens
ttgcgacccgggttcgattcccgggcggcgc

SEQ ID NO: 43018 - DNA, 32 bp, Homo Sapiens; identical to SEQ ID NO: 30269

SEQ ID NO: 43019 - DNA, 33 bp, Homo Sapiens; identical to SEQ ID NO: 30270

SEQ ID NO: 43020 - DNA, 34 bp, Homo Sapiens; identical to SEQ ID NO: 30271

SEQ ID NO: 43021 - DNA, 35 bp, Homo Sapiens; identical to SEQ ID NO: 30272

SEQ ID NO: 43022 - DNA, 27 bp, Homo Sapiens
ttgcgtgttcaaatcacgtcggggtca

SEQ ID NO: 43023 - DNA, 29 bp, Homo Sapiens
ttgcgtgttcaaatcacgtcggggtcacc

SEQ ID NO: 43024 - DNA, 27 bp, Homo Sapiens
ttgcgtgttcaagtcacgtcggggtca

SEQ ID NO: 43025 - DNA, 29 bp, Homo Sapiens
ttgcgtgttcaagtcacgtcggggtcacc

SEQ ID NO: 43026 - DNA, 17 bp, Homo Sapiens
ttgcgttcagttgatgc

SEQ ID NO: 43027 - DNA, 35 bp, Homo Sapiens; identical to SEQ ID NO: 30296

SEQ ID NO: 43028 - DNA, 39 bp, Homo Sapiens
ttggattctcagggatgggttcgattctcatagtcctag

SEQ ID NO: 43029 - DNA, 40 bp, Homo Sapiens; identical to SEQ ID NO: 30306

SEQ ID NO: 43030 - DNA, 20 bp, Homo Sapiens
ttgggagagcgttagactga

SEQ ID NO: 43031 - DNA, 29 bp, Homo Sapiens
ttgggagagcgttagactgaagatctaaa

SEQ ID NO: 43032 - DNA, 18 bp, Homo Sapiens
ttgggtgcgagaggtccc

SEQ ID NO: 43033 - DNA, 19 bp, Homo Sapiens
ttgggtgcgagaggtcccg

SEQ ID NO: 43034 - DNA, 20 bp, Homo Sapiens
ttgggtgcgagaggtcccgg

SEQ ID NO: 43035 - DNA, 22 bp, Homo Sapiens
ttgggtgcgagaggtcccgggt

SEQ ID NO: 43036 - DNA, 23 bp, Homo Sapiens
ttgggtgcgagaggtcccgggtt

SEQ ID NO: 43037 - DNA, 42 bp, Homo Sapiens
ttgggtgcgagaggtcccgggttcaaatcccggacgagcccc

SEQ ID NO: 43038 - DNA, 40 bp, Homo Sapiens; identical to SEQ ID NO: 30354

SEQ ID NO: 43039 - DNA, 41 bp, Homo Sapiens; identical to SEQ ID NO: 30355

SEQ ID NO: 43040 - DNA, 17 bp, Homo Sapiens
ttggtagagcatgggac

SEQ ID NO: 43041 - DNA, 26 bp, Homo Sapiens
ttggtagagcatgggactcttaatcc

SEQ ID NO: 43042 - DNA, 17 bp, Homo Sapiens
ttggtagagcggaggac

SEQ ID NO: 43043 - DNA, 21 bp, Homo Sapiens
ttggtagagcggaggactgta

SEQ ID NO: 43044 - DNA, 27 bp, Homo Sapiens
ttggtagagcggaggactgtagatcct

SEQ ID NO: 43045 - DNA, 28 bp, Homo Sapiens
ttggtagagcggaggactgtagatcctt

SEQ ID NO: 43046 - DNA, 16 bp, Homo Sapiens
ttggtcgtggttgtag

SEQ ID NO: 43047 - DNA, 17 bp, Homo Sapiens
ttggtcgtggttgtagt

SEQ ID NO: 43048 - DNA, 18 bp, Homo Sapiens
ttggtcgtggttgtagtc

SEQ ID NO: 43049 - DNA, 19 bp, Homo Sapiens
ttggtcgtggttgtagtcc

SEQ ID NO: 43050 - DNA, 20 bp, Homo Sapiens
ttggtcgtggttgtagtccg

SEQ ID NO: 43051 - DNA, 21 bp, Homo Sapiens
ttggtcgtggttgtagtccgt

SEQ ID NO: 43052 - DNA, 22 bp, Homo Sapiens
ttggtcgtggttgtagtccgtg

SEQ ID NO: 43053 - DNA, 23 bp, Homo Sapiens
ttggtcgtggttgtagtccgtgc

SEQ ID NO: 43054 - DNA, 24 bp, Homo Sapiens
ttggtcgtggttgtagtccgtgcg

SEQ ID NO: 43055 - DNA, 25 bp, Homo Sapiens
ttggtcgtggttgtagtccgtgcga

SEQ ID NO: 43056 - DNA, 26 bp, Homo Sapiens
ttggtcgtggttgtagtccgtgcgag

SEQ ID NO: 43057 - DNA, 27 bp, Homo Sapiens
ttggtcgtggttgtagtccgtgcgaga

SEQ ID NO: 43058 - DNA, 28 bp, Homo Sapiens
ttggtcgtggttgtagtccgtgcgagaa

SEQ ID NO: 43059 - DNA, 29 bp, Homo Sapiens
ttggtcgtggttgtagtccgtgcgagaat

SEQ ID NO: 43060 - DNA, 30 bp, Homo Sapiens; identical to SEQ ID NO: 30377

SEQ ID NO: 43061 - DNA, 31 bp, Homo Sapiens; identical to SEQ ID NO: 30378

SEQ ID NO: 43062 - DNA, 32 bp, Homo Sapiens; identical to SEQ ID NO: 30379

SEQ ID NO: 43063 - DNA, 33 bp, Homo Sapiens; identical to SEQ ID NO: 30380

SEQ ID NO: 43064 - DNA, 20 bp, Homo Sapiens
ttggtctaggggtatgattc

SEQ ID NO: 43065 - DNA, 22 bp, Homo Sapiens
ttggtctaggggtatgattctc

SEQ ID NO: 43066 - DNA, 24 bp, Homo Sapiens
ttggtctaggggtatgattctcgc

SEQ ID NO: 43067 - DNA, 25 bp, Homo Sapiens
ttggtctaggggtatgattctcgct

SEQ ID NO: 43068 - DNA, 26 bp, Homo Sapiens
ttggtctaggggtatgattctcgctt

SEQ ID NO: 43069 - DNA, 29 bp, Homo Sapiens
ttggtctaggggtatgattctcgctttgg

SEQ ID NO: 43070 - DNA, 20 bp, Homo Sapiens
ttggtggtatagtggtgagc

SEQ ID NO: 43071 - DNA, 21 bp, Homo Sapiens
ttggtggtatagtggtgagca

SEQ ID NO: 43072 - DNA, 16 bp, Homo Sapiens
ttggtggttcagtggt

SEQ ID NO: 43073 - DNA, 17 bp, Homo Sapiens
ttggtggttcagtggta

SEQ ID NO: 43074 - DNA, 19 bp, Homo Sapiens
ttggtggttcagtggtaga

SEQ ID NO: 43075 - DNA, 20 bp, Homo Sapiens
ttggtggttcagtggtagaa

SEQ ID NO: 43076 - DNA, 21 bp, Homo Sapiens
ttggtggttcagtggtagaat

SEQ ID NO: 43077 - DNA, 22 bp, Homo Sapiens
ttggtggttcagtggtagaatt

SEQ ID NO: 43078 - DNA, 23 bp, Homo Sapiens
ttggtggttcagtggtagaattc

SEQ ID NO: 43079 - DNA, 24 bp, Homo Sapiens
ttggtggttcagtggtagaattct

SEQ ID NO: 43080 - DNA, 25 bp, Homo Sapiens
ttggtggttcagtggtagaattctc

SEQ ID NO: 43081 - DNA, 26 bp, Homo Sapiens
ttggtggttcagtggtagaattctcg

SEQ ID NO: 43082 - DNA, 27 bp, Homo Sapiens
ttggtggttcagtggtagaattctcgc

SEQ ID NO: 43083 - DNA, 28 bp, Homo Sapiens
ttggtggttcagtggtagaattctcgcc

SEQ ID NO: 43084 - DNA, 29 bp, Homo Sapiens
ttggtggttcagtggtagaattctcgcct

SEQ ID NO: 43085 - DNA, 32 bp, Homo Sapiens; identical to SEQ ID NO: 30456

SEQ ID NO: 43086 - DNA, 47 bp, Homo Sapiens
ttggtggttcagtggtagaattctcgcctcccacgcgggagacccgg

SEQ ID NO: 43087 - DNA, 30 bp, Homo Sapiens; identical to SEQ ID NO: 30459

SEQ ID NO: 43088 - DNA, 31 bp, Homo Sapiens; identical to SEQ ID NO: 30460

SEQ ID NO: 43089 - DNA, 32 bp, Homo Sapiens; identical to SEQ ID NO: 30461

SEQ ID NO: 43090 - DNA, 33 bp, Homo Sapiens; identical to SEQ ID NO: 30462

SEQ ID NO: 43091 - DNA, 34 bp, Homo Sapiens; identical to SEQ ID NO: 30463

SEQ ID NO: 43092 - DNA, 35 bp, Homo Sapiens; identical to SEQ ID NO: 30464

SEQ ID NO: 43093 - DNA, 40 bp, Homo Sapiens; identical to SEQ ID NO: 30469

SEQ ID NO: 43094 - DNA, 44 bp, Homo Sapiens; identical to SEQ ID NO: 30473

SEQ ID NO: 43095 - DNA, 45 bp, Homo Sapiens; identical to SEQ ID NO: 30474

SEQ ID NO: 43096 - DNA, 46 bp, Homo Sapiens; identical to SEQ ID NO: 30475

SEQ ID NO: 43097 - DNA, 47 bp, Homo Sapiens; identical to SEQ ID NO: 30476

SEQ ID NO: 43098 - DNA, 26 bp, Homo Sapiens
ttggtggttcgagcccacccagggac

SEQ ID NO: 43099 - DNA, 27 bp, Homo Sapiens
ttggtggttcgagcccacccagggacg

SEQ ID NO: 43100 - DNA, 28 bp, Homo Sapiens
ttggtggttcgagcccacccagggacgc

SEQ ID NO: 43101 - DNA, 29 bp, Homo Sapiens
ttggtggttcgagcccacccagggacgcc

SEQ ID NO: 43102 - DNA, 30 bp, Homo Sapiens; identical to SEQ ID NO: 30485

SEQ ID NO: 43103 - DNA, 29 bp, Homo Sapiens
ttggtggttcgatcccacccagggacgcc

SEQ ID NO: 43104 - DNA, 25 bp, Homo Sapiens
ttggttatacccttcccgtactacc

SEQ ID NO: 43105 - DNA, 26 bp, Homo Sapiens
ttggttatacccttcccgtactacca

SEQ ID NO: 43106 - DNA, 19 bp, Homo Sapiens
ttgtaaaccaggggtcgcg

SEQ ID NO: 43107 - DNA, 20 bp, Homo Sapiens
ttgtaaaccggagatgaaaa

SEQ ID NO: 43108 - DNA, 21 bp, Homo Sapiens
ttgtaaaccggagatgaaaac

SEQ ID NO: 43109 - DNA, 22 bp, Homo Sapiens
ttgtaaaccggagatgaaaacc

SEQ ID NO: 43110 - DNA, 34 bp, Homo Sapiens; identical to SEQ ID NO: 30529

SEQ ID NO: 43111 - DNA, 35 bp, Homo Sapiens; identical to SEQ ID NO: 30530

SEQ ID NO: 43112 - DNA, 36 bp, Homo Sapiens; identical to SEQ ID NO: 30531

SEQ ID NO: 43113 - DNA, 37 bp, Homo Sapiens; identical to SEQ ID NO: 30532

SEQ ID NO: 43114 - DNA, 38 bp, Homo Sapiens; identical to SEQ ID NO: 30533

SEQ ID NO: 43115 - DNA, 39 bp, Homo Sapiens; identical to SEQ ID NO: 30534

SEQ ID NO: 43116 - DNA, 18 bp, Homo Sapiens
ttgtagtccgtgcgagaa

SEQ ID NO: 43117 - DNA, 19 bp, Homo Sapiens
ttgtagtccgtgcgagaat

SEQ ID NO: 43118 - DNA, 20 bp, Homo Sapiens
ttgtagtccgtgcgagaata

SEQ ID NO: 43119 - DNA, 22 bp, Homo Sapiens
ttgtagtccgtgcgagaatacc

SEQ ID NO: 43120 - DNA, 23 bp, Homo Sapiens
ttgtagtccgtgcgagaatacca

SEQ ID NO: 43121 - DNA, 16 bp, Homo Sapiens
ttgtgaatctgacaac

SEQ ID NO: 43122 - DNA, 17 bp, Homo Sapiens
ttgtgaatctgacaaca

SEQ ID NO: 43123 - DNA, 18 bp, Homo Sapiens
ttgtgaatctgacaacag

SEQ ID NO: 43124 - DNA, 19 bp, Homo Sapiens
ttgtgaatctgacaacaga

SEQ ID NO: 43125 - DNA, 20 bp, Homo Sapiens
ttgtgaatctgacaacagag

SEQ ID NO: 43126 - DNA, 21 bp, Homo Sapiens
ttgtgaatctgacaacagagg

SEQ ID NO: 43127 - DNA, 22 bp, Homo Sapiens
ttgtgaatctgacaacagaggc

SEQ ID NO: 43128 - DNA, 23 bp, Homo Sapiens
ttgtgaatctgacaacagaggct

SEQ ID NO: 43129 - DNA, 24 bp, Homo Sapiens
ttgtgaatctgacaacagaggctt

SEQ ID NO: 43130 - DNA, 25 bp, Homo Sapiens
ttgtgaatctgacaacagaggctta

SEQ ID NO: 43131 - DNA, 27 bp, Homo Sapiens
ttgtgaatctgacaacagaggcttacg

SEQ ID NO: 43132 - DNA, 29 bp, Homo Sapiens
ttgtgaatctgacaacagaggcttacgac

SEQ ID NO: 43133 - DNA, 30 bp, Homo Sapiens; identical to SEQ ID NO: 30580

SEQ ID NO: 43134 - DNA, 31 bp, Homo Sapiens; identical to SEQ ID NO: 30581

SEQ ID NO: 43135 - DNA, 32 bp, Homo Sapiens; identical to SEQ ID NO: 30582

SEQ ID NO: 43136 - DNA, 33 bp, Homo Sapiens; identical to SEQ ID NO: 30583

SEQ ID NO: 43137 - DNA, 35 bp, Homo Sapiens; identical to SEQ ID NO: 30585

SEQ ID NO: 43138 - DNA, 36 bp, Homo Sapiens; identical to SEQ ID NO: 30586

SEQ ID NO: 43139 - DNA, 40 bp, Homo Sapiens; identical to SEQ ID NO: 30590

SEQ ID NO: 43140 - DNA, 41 bp, Homo Sapiens; identical to SEQ ID NO: 30591

SEQ ID NO: 43141 - DNA, 42 bp, Homo Sapiens; identical to SEQ ID NO: 30592

SEQ ID NO: 43142 - DNA, 43 bp, Homo Sapiens; identical to SEQ ID NO: 30593

SEQ ID NO: 43143 - DNA, 44 bp, Homo Sapiens; identical to SEQ ID NO: 30594

SEQ ID NO: 43144 - DNA, 29 bp, Homo Sapiens
ttgtgagttcgagcctcacctggagcacc

SEQ ID NO: 43145 - DNA, 23 bp, Homo Sapiens
ttgtgctttgcacgcgtgggttc

SEQ ID NO: 43146 - DNA, 42 bp, Homo Sapiens; identical to SEQ ID NO: 30607

SEQ ID NO: 43147 - DNA, 16 bp, Homo Sapiens
ttgtggccgcagcaac

SEQ ID NO: 43148 - DNA, 17 bp, Homo Sapiens
ttgtggccgcagcaacc

SEQ ID NO: 43149 - DNA, 18 bp, Homo Sapiens
ttgtggccgcagcaacct

SEQ ID NO: 43150 - DNA, 28 bp, Homo Sapiens
ttgtgggttcgaatcccaccagagtcgc

SEQ ID NO: 43151 - DNA, 29 bp, Homo Sapiens
ttgtgggttcgaatcccaccagagtcgcc

SEQ ID NO: 43152 - DNA, 28 bp, Homo Sapiens
ttgtgggttcgagtcccaccagagtcgc

SEQ ID NO: 43153 - DNA, 29 bp, Homo Sapiens
ttgtgggttcgagtcccaccagagtcgcc

SEQ ID NO: 43154 - DNA, 27 bp, Homo Sapiens
ttgtgggttcgagtcccatctggggtg

SEQ ID NO: 43155 - DNA, 28 bp, Homo Sapiens
ttgtgggttcgagtcccatctggggtgc

SEQ ID NO: 43156 - DNA, 28 bp, Homo Sapiens
ttgtgggttcgagtcccatctgggtcgc

SEQ ID NO: 43157 - DNA, 29 bp, Homo Sapiens
ttgtgggttcgagtcccatctgggtcgcc

SEQ ID NO: 43158 - DNA, 28 bp, Homo Sapiens
ttgtgggtttaagtcccattggtctagc

SEQ ID NO: 43159 - DNA, 29 bp, Homo Sapiens
ttgtgggtttaagtcccattggtctagcc

SEQ ID NO: 43160 - DNA, 27 bp, Homo Sapiens
tttaaccaaaacatcagattgtgaatc

SEQ ID NO: 43161 - DNA, 24 bp, Homo Sapiens
tttaagttaaagattaagagaacc

SEQ ID NO: 43162 - DNA, 43 bp, Homo Sapiens; identical to SEQ ID NO: 30710

SEQ ID NO: 43163 - DNA, 45 bp, Homo Sapiens; identical to SEQ ID NO: 30712

SEQ ID NO: 43164 - DNA, 20 bp, Homo Sapiens
tttacacgcagaaggtcctg

SEQ ID NO: 43165 - DNA, 44 bp, Homo Sapiens; identical to SEQ ID NO: 30722

SEQ ID NO: 43166 - DNA, 16 bp, Homo Sapiens
tttacagtcagaggtt

SEQ ID NO: 43167 - DNA, 17 bp, Homo Sapiens
tttacagtcagaggttc

SEQ ID NO: 43168 - DNA, 16 bp, Homo Sapiens
tttagacgggctcaca

SEQ ID NO: 43169 - DNA, 18 bp, Homo Sapiens
tttagacgggctcacatc

SEQ ID NO: 43170 - DNA, 21 bp, Homo Sapiens
tttagacgggctcacatcacc

SEQ ID NO: 43171 - DNA, 22 bp, Homo Sapiens
tttagacgggctcacatcaccc

SEQ ID NO: 43172 - DNA, 28 bp, Homo Sapiens
tttagacgggctcacatcaccccataaa

SEQ ID NO: 43173 - DNA, 30 bp, Homo Sapiens; identical to SEQ ID NO: 30752

SEQ ID NO: 43174 - DNA, 32 bp, Homo Sapiens; identical to SEQ ID NO: 30754

SEQ ID NO: 43175 - DNA, 33 bp, Homo Sapiens; identical to SEQ ID NO: 30755

SEQ ID NO: 43176 - DNA, 17 bp, Homo Sapiens
tttaggctccagtcatt

SEQ ID NO: 43177 - DNA, 17 bp, Homo Sapiens
tttaggctccagtctct

SEQ ID NO: 43178 - DNA, 18 bp, Homo Sapiens
tttaggctccagtctctt

SEQ ID NO: 43179 - DNA, 19 bp, Homo Sapiens
tttaggctccagtctcttc

SEQ ID NO: 43180 - DNA, 17 bp, Homo Sapiens
tttcaacttaacttgac

SEQ ID NO: 43181 - DNA, 18 bp, Homo Sapiens
tttcaacttaacttgacc

SEQ ID NO: 43182 - DNA, 22 bp, Homo Sapiens
tttcaacttaacttgaccgctc

SEQ ID NO: 43183 - DNA, 24 bp, Homo Sapiens
tttcaacttaacttgaccgctctg

SEQ ID NO: 43184 - DNA, 25 bp, Homo Sapiens
tttcaacttaacttgaccgctctga

SEQ ID NO: 43185 - DNA, 26 bp, Homo Sapiens
tttcaacttaacttgaccgctctgac

SEQ ID NO: 43186 - DNA, 27 bp, Homo Sapiens
tttcaacttaacttgaccgctctgacc

SEQ ID NO: 43187 - DNA, 28 bp, Homo Sapiens
tttcaacttaacttgaccgctctgacca

SEQ ID NO: 43188 - DNA, 16 bp, Homo Sapiens
tttcacccaggcggcc

SEQ ID NO: 43189 - DNA, 18 bp, Homo Sapiens
tttcacccaggcggcccg

SEQ ID NO: 43190 - DNA, 40 bp, Homo Sapiens; identical to SEQ ID NO: 30793

SEQ ID NO: 43191 - DNA, 41 bp, Homo Sapiens; identical to SEQ ID NO: 30794

SEQ ID NO: 43192 - DNA, 42 bp, Homo Sapiens; identical to SEQ ID NO: 30795

SEQ ID NO: 43193 - DNA, 43 bp, Homo Sapiens; identical to SEQ ID NO: 30796

SEQ ID NO: 43194 - DNA, 40 bp, Homo Sapiens
tttcacccaggtggcccgggttcgactcccggtatgggaa

SEQ ID NO: 43195 - DNA, 37 bp, Homo Sapiens; identical to SEQ ID NO: 30824

SEQ ID NO: 43196 - DNA, 38 bp, Homo Sapiens; identical to SEQ ID NO: 30825

SEQ ID NO: 43197 - DNA, 39 bp, Homo Sapiens; identical to SEQ ID NO: 30826

SEQ ID NO: 43198 - DNA, 40 bp, Homo Sapiens; identical to SEQ ID NO: 30827

SEQ ID NO: 43199 - DNA, 42 bp, Homo Sapiens; identical to SEQ ID NO: 30829

SEQ ID NO: 43200 - DNA, 43 bp, Homo Sapiens; identical to SEQ ID NO: 30830

SEQ ID NO: 43201 - DNA, 36 bp, Homo Sapiens; identical to SEQ ID NO: 30844

SEQ ID NO: 43202 - DNA, 36 bp, Homo Sapiens; identical to SEQ ID NO: 30851

SEQ ID NO: 43203 - DNA, 32 bp, Homo Sapiens; identical to SEQ ID NO: 30853

SEQ ID NO: 43204 - DNA, 31 bp, Homo Sapiens; identical to SEQ ID NO: 30860

SEQ ID NO: 43205 - DNA, 32 bp, Homo Sapiens; identical to SEQ ID NO: 30861

SEQ ID NO: 43206 - DNA, 16 bp, Homo Sapiens
tttccgtagtgtagtg

SEQ ID NO: 43207 - DNA, 22 bp, Homo Sapiens
tttccgtagtgtagtggtcatc

SEQ ID NO: 43208 - DNA, 30 bp, Homo Sapiens; identical to SEQ ID NO: 30871

SEQ ID NO: 43209 - DNA, 31 bp, Homo Sapiens; identical to SEQ ID NO: 30872

SEQ ID NO: 43210 - DNA, 32 bp, Homo Sapiens; identical to SEQ ID NO: 30873

SEQ ID NO: 43211 - DNA, 22 bp, Homo Sapiens
tttccgtagtgtagtggttatc

SEQ ID NO: 43212 - DNA, 23 bp, Homo Sapiens
tttccgtagtgtagtggttatca

SEQ ID NO: 43213 - DNA, 29 bp, Homo Sapiens
tttccgtagtgtagtggttatcacgttcg

SEQ ID NO: 43214 - DNA, 30 bp, Homo Sapiens; identical to SEQ ID NO: 30883

SEQ ID NO: 43215 - DNA, 31 bp, Homo Sapiens; identical to SEQ ID NO: 30884

SEQ ID NO: 43216 - DNA, 32 bp, Homo Sapiens; identical to SEQ ID NO: 30885

SEQ ID NO: 43217 - DNA, 33 bp, Homo Sapiens; identical to SEQ ID NO: 30887

SEQ ID NO: 43218 - DNA, 34 bp, Homo Sapiens; identical to SEQ ID NO: 30888

SEQ ID NO: 43219 - DNA, 37 bp, Homo Sapiens; identical to SEQ ID NO: 30923

SEQ ID NO: 43220 - DNA, 36 bp, Homo Sapiens; identical to SEQ ID NO: 30968

SEQ ID NO: 43221 - DNA, 19 bp, Homo Sapiens
tttgcacgtatgaggcccc

SEQ ID NO: 43222 - DNA, 39 bp, Homo Sapiens; identical to SEQ ID NO: 30976

SEQ ID NO: 43223 - DNA, 40 bp, Homo Sapiens
tttgcacgtatgaggccccgggttcaatccccggcatctc

SEQ ID NO: 43224 - DNA, 44 bp, Homo Sapiens
tttgcacgtatgaggccccgggttcaatccccggcatctccacc

SEQ ID NO: 43225 - DNA, 17 bp, Homo Sapiens
tttgcgttcagttgatg

SEQ ID NO: 43226 - DNA, 18 bp, Homo Sapiens
tttggattctcagggatg

SEQ ID NO: 43227 - DNA, 40 bp, Homo Sapiens; identical to SEQ ID NO: 30982

SEQ ID NO: 43228 - DNA, 41 bp, Homo Sapiens; identical to SEQ ID NO: 30983

SEQ ID NO: 43229 - DNA, 43 bp, Homo Sapiens
tttggattctcagggatgggttcgattctcatagtcctagcca

SEQ ID NO: 43230 - DNA, 19 bp, Homo Sapiens
tttgggtccgagaggtccc

SEQ ID NO: 43231 - DNA, 18 bp, Homo Sapiens
tttgggtgcgagaggtcc

SEQ ID NO: 43232 - DNA, 19 bp, Homo Sapiens
tttgggtgcgagaggtccc

SEQ ID NO: 43233 - DNA, 20 bp, Homo Sapiens
tttgggtgcgagaggtcccg

SEQ ID NO: 43234 - DNA, 21 bp, Homo Sapiens
tttgggtgcgagaggtcccgg

SEQ ID NO: 43235 - DNA, 23 bp, Homo Sapiens
tttgggtgcgagaggtcccgggt

SEQ ID NO: 43236 - DNA, 24 bp, Homo Sapiens
tttgggtgcgagaggtcccgggtt

SEQ ID NO: 43237 - DNA, 25 bp, Homo Sapiens
tttgggtgcgagaggtcccgggttc

SEQ ID NO: 43238 - DNA, 43 bp, Homo Sapiens
tttgggtgcgagaggtcccgggttcaaatcccggacgagcccc

SEQ ID NO: 43239 - DNA, 41 bp, Homo Sapiens; identical to SEQ ID NO: 31016

SEQ ID NO: 43240 - DNA, 29 bp, Homo Sapiens
tttgtgggtttaagtcccattggtctagc

SEQ ID NO: 43241 - DNA, 30 bp, Homo Sapiens; identical to SEQ ID NO: 31052

SEQ ID NO: 43242 - DNA, 29 bp, Homo Sapiens
ttttaaaggataacagctatccattggtc

SEQ ID NO: 43243 - DNA, 25 bp, Homo Sapiens
ttttaagttaaagattaagagaacc

SEQ ID NO: 43244 - DNA, 44 bp, Homo Sapiens; identical to SEQ ID NO: 31092

SEQ ID NO: 43245 - DNA, 16 bp, Homo Sapiens
ttttcacccaggcggc

SEQ ID NO: 43246 - DNA, 17 bp, Homo Sapiens
ttttcacccaggcggcc

SEQ ID NO: 43247 - DNA, 19 bp, Homo Sapiens
ttttcacccaggcggcccg

SEQ ID NO: 43248 - DNA, 41 bp, Homo Sapiens; identical to SEQ ID NO: 31112

SEQ ID NO: 43249 - DNA, 42 bp, Homo Sapiens; identical to SEQ ID NO: 31113

SEQ ID NO: 43250 - DNA, 43 bp, Homo Sapiens; identical to SEQ ID NO: 31114

SEQ ID NO: 43251 - DNA, 44 bp, Homo Sapiens; identical to SEQ ID NO: 31115

SEQ ID NO: 43252 - DNA, 18 bp, Homo Sapiens
ttttcacccaggtggccc

SEQ ID NO: 43253 - DNA, 42 bp, Homo Sapiens
ttttcacccaggtggcccgggttcgactcccggtatgggaac

SEQ ID NO: 43254 - DNA, 17 bp, Homo Sapiens
ttttcatatcattggtc

SEQ ID NO: 43255 - DNA, 38 bp, Homo Sapiens; identical to SEQ ID NO: 31139

SEQ ID NO: 43256 - DNA, 39 bp, Homo Sapiens; identical to SEQ ID NO: 31140

SEQ ID NO: 43257 - DNA, 40 bp, Homo Sapiens; identical to SEQ ID NO: 31141

SEQ ID NO: 43258 - DNA, 41 bp, Homo Sapiens; identical to SEQ ID NO: 31142

SEQ ID NO: 43259 - DNA, 43 bp, Homo Sapiens; identical to SEQ ID NO: 31144

SEQ ID NO: 43260 - DNA, 44 bp, Homo Sapiens; identical to SEQ ID NO: 31145

SEQ ID NO: 43261 - DNA, 16 bp, Homo Sapiens
ttttccaaggacacca

SEQ ID NO: 43262 - DNA, 16 bp, Homo Sapiens
ttttgcagtccttacc

SEQ ID NO: 43263 - DNA, 18 bp, Homo Sapiens
ttttggattctcagggat

SEQ ID NO: 43264 - DNA, 41 bp, Homo Sapiens; identical to SEQ ID NO: 31159

SEQ ID NO: 43265 - DNA, 42 bp, Homo Sapiens; identical to SEQ ID NO: 31160

SEQ ID NO: 43266 - DNA, 18 bp, Homo Sapiens
tttttcatatcattggtc

SEQ ID NO: 43267 - DNA, 19 bp, Homo Sapiens
tttttcatatcattggtcg

SEQ ID NO: 43268 - DNA, 31 bp, Homo Sapiens; identical to SEQ ID NO: 31182

SEQ ID NO: 43269 - DNA, 33 bp, Homo Sapiens; identical to SEQ ID NO: 31184

SEQ ID NO: 43270 - DNA, 39 bp, Homo Sapiens; identical to SEQ ID NO: 31189

SEQ ID NO: 43271 - DNA, 40 bp, Homo Sapiens; identical to SEQ ID NO: 31190

SEQ ID NO: 43272 - DNA, 41 bp, Homo Sapiens; identical to SEQ ID NO: 31191

SEQ ID NO: 43273 - DNA, 42 bp, Homo Sapiens; identical to SEQ ID NO: 31192

SEQ ID NO: 43274 - DNA, 44 bp, Homo Sapiens; identical to SEQ ID NO: 31194

SEQ ID NO: 43275 - DNA, 45 bp, Homo Sapiens; identical to SEQ ID NO: 31195

SEQ ID NO: 43276 - DNA, 16 bp, Homo Sapiens
tttttccaaggacacc

SEQ ID NO: 43277 - DNA, 17 bp, Homo Sapiens
tttttccaaggacacca

SEQ ID NO: 43278 - DNA, 16 bp, Homo Sapiens
aaaaagtcatggaggc

SEQ ID NO: 43279 - DNA, 17 bp, Homo Sapiens
aaaaagtcatggaggcc

SEQ ID NO: 43280 - DNA, 25 bp, Homo Sapiens
aaaaagtcatggaggccatggggtt

SEQ ID NO: 43281 - DNA, 20 bp, Homo Sapiens
aaaacatcagattgtgaatc

SEQ ID NO: 43282 - DNA, 21 bp, Homo Sapiens
aaaacatcagattgtgaatct

SEQ ID NO: 43283 - DNA, 33 bp, Homo Sapiens; identical to SEQ ID NO: 45

SEQ ID NO: 43284 - DNA, 34 bp, Homo Sapiens; identical to SEQ ID NO: 46

SEQ ID NO: 43285 - DNA, 35 bp, Homo Sapiens; identical to SEQ ID NO: 47

SEQ ID NO: 43286 - DNA, 38 bp, Homo Sapiens; identical to SEQ ID NO: 50

SEQ ID NO: 43287 - DNA, 39 bp, Homo Sapiens; identical to SEQ ID NO: 51

SEQ ID NO: 43288 - DNA, 40 bp, Homo Sapiens; identical to SEQ ID NO: 52

SEQ ID NO: 43289 - DNA, 41 bp, Homo Sapiens; identical to SEQ ID NO: 53

SEQ ID NO: 43290 - DNA, 42 bp, Homo Sapiens; identical to SEQ ID NO: 54

SEQ ID NO: 43291 - DNA, 43 bp, Homo Sapiens; identical to SEQ ID NO: 55

SEQ ID NO: 43292 - DNA, 44 bp, Homo Sapiens; identical to SEQ ID NO: 56

SEQ ID NO: 43293 - DNA, 45 bp, Homo Sapiens; identical to SEQ ID NO: 57

SEQ ID NO: 43294 - DNA, 22 bp, Homo Sapiens
aaaaccatttcataactttgtc

SEQ ID NO: 43295 - DNA, 19 bp, Homo Sapiens
aaaacctttttccaaggac

SEQ ID NO: 43296 - DNA, 20 bp, Homo Sapiens
aaaacctttttccaaggaca

SEQ ID NO: 43297 - DNA, 21 bp, Homo Sapiens
aaaacctttttccaaggacac

SEQ ID NO: 43298 - DNA, 22 bp, Homo Sapiens
aaaacctttttccaaggacacc

SEQ ID NO: 43299 - DNA, 20 bp, Homo Sapiens
aaaacgaatgatttcgactc

SEQ ID NO: 43300 - DNA, 40 bp, Homo Sapiens; identical to SEQ ID NO: 91

SEQ ID NO: 43301 - DNA, 36 bp, Homo Sapiens; identical to SEQ ID NO: 104

SEQ ID NO: 43302 - DNA, 16 bp, Homo Sapiens
aaaagtcatggaggcc

SEQ ID NO: 43303 - DNA, 17 bp, Homo Sapiens
aaaatgttggttatacc

SEQ ID NO: 43304 - DNA, 18 bp, Homo Sapiens
aaaatgttggttataccc

SEQ ID NO: 43305 - DNA, 23 bp, Homo Sapiens
aaaatgttggttatacccttccc

SEQ ID NO: 43306 - DNA, 24 bp, Homo Sapiens
aaaatgttggttatacccttcccg

SEQ ID NO: 43307 - DNA, 28 bp, Homo Sapiens
aaaatgttggttatacccttcccgtact

SEQ ID NO: 43308 - DNA, 29 bp, Homo Sapiens
aaaatgttggttatacccttcccgtacta

SEQ ID NO: 43309 - DNA, 30 bp, Homo Sapiens; identical to SEQ ID NO: 130

SEQ ID NO: 43310 - DNA, 31 bp, Homo Sapiens; identical to SEQ ID NO: 131

SEQ ID NO: 43311 - DNA, 32 bp, Homo Sapiens; identical to SEQ ID NO: 132

SEQ ID NO: 43312 - DNA, 17 bp, Homo Sapiens
aaaatgtttagacgggc

SEQ ID NO: 43313 - DNA, 18 bp, Homo Sapiens
aaaatgtttagacgggct

SEQ ID NO: 43314 - DNA, 19 bp, Homo Sapiens
aaaatgtttagacgggctc

SEQ ID NO: 43315 - DNA, 22 bp, Homo Sapiens
aaaatgtttagacgggctcaca

SEQ ID NO: 43316 - DNA, 27 bp, Homo Sapiens
aaaatgtttagacgggctcacatcacc

SEQ ID NO: 43317 - DNA, 28 bp, Homo Sapiens
aaaatgtttagacgggctcacatcaccc

SEQ ID NO: 43318 - DNA, 29 bp, Homo Sapiens
aaaatgtttagacgggctcacatcacccc

SEQ ID NO: 43319 - DNA, 32 bp, Homo Sapiens; identical to SEQ ID NO: 149

SEQ ID NO: 43320 - DNA, 38 bp, Homo Sapiens; identical to SEQ ID NO: 154

SEQ ID NO: 43321 - DNA, 39 bp, Homo Sapiens; identical to SEQ ID NO: 155

SEQ ID NO: 43322 - DNA, 21 bp, Homo Sapiens
aaacaggagatcctgggttcg

SEQ ID NO: 43323 - DNA, 37 bp, Homo Sapiens; identical to SEQ ID NO: 185

SEQ ID NO: 43324 - DNA, 16 bp, Homo Sapiens
aaacatcagattgtga

SEQ ID NO: 43325 - DNA, 19 bp, Homo Sapiens
aaacatcagattgtgaatc

SEQ ID NO: 43326 - DNA, 20 bp, Homo Sapiens
aaacatcagattgtgaatct

SEQ ID NO: 43327 - DNA, 29 bp, Homo Sapiens
aaacatcagattgtgaatctgacaacaga

SEQ ID NO: 43328 - DNA, 32 bp, Homo Sapiens; identical to SEQ ID NO: 206

SEQ ID NO: 43329 - DNA, 33 bp, Homo Sapiens; identical to SEQ ID NO: 207

SEQ ID NO: 43330 - DNA, 34 bp, Homo Sapiens; identical to SEQ ID NO: 208

SEQ ID NO: 43331 - DNA, 37 bp, Homo Sapiens; identical to SEQ ID NO: 211

SEQ ID NO: 43332 - DNA, 40 bp, Homo Sapiens; identical to SEQ ID NO: 214

SEQ ID NO: 43333 - DNA, 41 bp, Homo Sapiens; identical to SEQ ID NO: 215

SEQ ID NO: 43334 - DNA, 42 bp, Homo Sapiens; identical to SEQ ID NO: 216

SEQ ID NO: 43335 - DNA, 43 bp, Homo Sapiens; identical to SEQ ID NO: 217

SEQ ID NO: 43336 - DNA, 44 bp, Homo Sapiens; identical to SEQ ID NO: 218

SEQ ID NO: 43337 - DNA, 45 bp, Homo Sapiens; identical to SEQ ID NO: 219

SEQ ID NO: 43338 - DNA, 18 bp, Homo Sapiens
aaaccatcctctgctacc

SEQ ID NO: 43339 - DNA, 19 bp, Homo Sapiens
aaaccatcctctgctacca

SEQ ID NO: 43340 - DNA, 28 bp, Homo Sapiens
aaaccatttcataactttgtcaaagtta

SEQ ID NO: 43341 - DNA, 37 bp, Homo Sapiens; identical to SEQ ID NO: 252

SEQ ID NO: 43342 - DNA, 21 bp, Homo Sapiens
aaaccgaagatcgcgggttcg

SEQ ID NO: 43343 - DNA, 37 bp, Homo Sapiens; identical to SEQ ID NO: 262

SEQ ID NO: 43344 - DNA, 17 bp, Homo Sapiens
aaaccgggcagaagcac

SEQ ID NO: 43345 - DNA, 18 bp, Homo Sapiens
aaaccgggcagaagcacc

SEQ ID NO: 43346 - DNA, 19 bp, Homo Sapiens
aaaccgggcagaagcacca

SEQ ID NO: 43347 - DNA, 16 bp, Homo Sapiens
aaaccgggcggaaaca

SEQ ID NO: 43348 - DNA, 17 bp, Homo Sapiens
aaaccgggcggaaacac

SEQ ID NO: 43349 - DNA, 18 bp, Homo Sapiens
aaaccgggcggaaacacc

SEQ ID NO: 43350 - DNA, 19 bp, Homo Sapiens
aaaccgggcggaaacacca

SEQ ID NO: 43351 - DNA, 16 bp, Homo Sapiens
aaacctgccggggctt

SEQ ID NO: 43352 - DNA, 17 bp, Homo Sapiens
aaacctgccggggcttc

SEQ ID NO: 43353 - DNA, 18 bp, Homo Sapiens
aaacctgccggggcttcc

SEQ ID NO: 43354 - DNA, 19 bp, Homo Sapiens
aaacctgccggggcttcca

SEQ ID NO: 43355 - DNA, 18 bp, Homo Sapiens
aaacctttttccaaggac

SEQ ID NO: 43356 - DNA, 20 bp, Homo Sapiens
aaacctttttccaaggacac

SEQ ID NO: 43357 - DNA, 18 bp, Homo Sapiens
aaacgaatgatttcgact

SEQ ID NO: 43358 - DNA, 19 bp, Homo Sapiens
aaacgaatgatttcgactc

SEQ ID NO: 43359 - DNA, 16 bp, Homo Sapiens
aaagactttttctctg

SEQ ID NO: 43360 - DNA, 17 bp, Homo Sapiens
aaagactttttctctga

SEQ ID NO: 43361 - DNA, 18 bp, Homo Sapiens
aaagactttttctctgac

SEQ ID NO: 43362 - DNA, 19 bp, Homo Sapiens
aaagactttttctctgacc

SEQ ID NO: 43363 - DNA, 20 bp, Homo Sapiens
aaagactttttctctgacca

SEQ ID NO: 43364 - DNA, 16 bp, Homo Sapiens
aaagattaagagaacc

SEQ ID NO: 43365 - DNA, 35 bp, Homo Sapiens; identical to SEQ ID NO: 362

SEQ ID NO: 43366 - DNA, 36 bp, Homo Sapiens; identical to SEQ ID NO: 363

SEQ ID NO: 43367 - DNA, 37 bp, Homo Sapiens; identical to SEQ ID NO: 364

SEQ ID NO: 43368 - DNA, 32 bp, Homo Sapiens; identical to SEQ ID NO: 370

SEQ ID NO: 43369 - DNA, 33 bp, Homo Sapiens; identical to SEQ ID NO: 371

SEQ ID NO: 43370 - DNA, 34 bp, Homo Sapiens; identical to SEQ ID NO: 372

SEQ ID NO: 43371 - DNA, 43 bp, Homo Sapiens; identical to SEQ ID NO: 380

SEQ ID NO: 43372 - DNA, 23 bp, Homo Sapiens
aaagctcacaagaactgctaact

SEQ ID NO: 43373 - DNA, 30 bp, Homo Sapiens; identical to SEQ ID NO: 413

SEQ ID NO: 43374 - DNA, 16 bp, Homo Sapiens
aaaggtccccggttcg

SEQ ID NO: 43375 - DNA, 21 bp, Homo Sapiens
aaaggtccccggttcgaaacc

SEQ ID NO: 43376 - DNA, 31 bp, Homo Sapiens; identical to SEQ ID NO: 438

SEQ ID NO: 43377 - DNA, 32 bp, Homo Sapiens; identical to SEQ ID NO: 31308

SEQ ID NO: 43378 - DNA, 16 bp, Homo Sapiens
aaaggtccctggttcg

SEQ ID NO: 43379 - DNA, 33 bp, Homo Sapiens; identical to SEQ ID NO: 444

SEQ ID NO: 43380 - DNA, 34 bp, Homo Sapiens; identical to SEQ ID NO: 445

SEQ ID NO: 43381 - DNA, 35 bp, Homo Sapiens; identical to SEQ ID NO: 446

SEQ ID NO: 43382 - DNA, 33 bp, Homo Sapiens; identical to SEQ ID NO: 449

SEQ ID NO: 43383 - DNA, 34 bp, Homo Sapiens; identical to SEQ ID NO: 450

SEQ ID NO: 43384 - DNA, 16 bp, Homo Sapiens
aaaggttggtggttcg

SEQ ID NO: 43385 - DNA, 31 bp, Homo Sapiens; identical to SEQ ID NO: 453

SEQ ID NO: 43386 - DNA, 34 bp, Homo Sapiens; identical to SEQ ID NO: 455

SEQ ID NO: 43387 - DNA, 33 bp, Homo Sapiens; identical to SEQ ID NO: 458

SEQ ID NO: 43388 - DNA, 34 bp, Homo Sapiens; identical to SEQ ID NO: 459

SEQ ID NO: 43389 - DNA, 34 bp, Homo Sapiens; identical to SEQ ID NO: 462

SEQ ID NO: 43390 - DNA, 18 bp, Homo Sapiens
aaagttaaattataggct

SEQ ID NO: 43391 - DNA, 16 bp, Homo Sapiens
aaataagctatcgggc

SEQ ID NO: 43392 - DNA, 18 bp, Homo Sapiens
aaataagctatcgggccc

SEQ ID NO: 43393 - DNA, 19 bp, Homo Sapiens
aaataagctatcgggccca

SEQ ID NO: 43394 - DNA, 27 bp, Homo Sapiens
aaataagctatcgggcccataccccga

SEQ ID NO: 43395 - DNA, 28 bp, Homo Sapiens
aaataagctatcgggcccataccccgaa

SEQ ID NO: 43396 - DNA, 29 bp, Homo Sapiens
aaataagctatcgggcccataccccgaaa

SEQ ID NO: 43397 - DNA, 30 bp, Homo Sapiens; identical to SEQ ID NO: 500

SEQ ID NO: 43398 - DNA, 21 bp, Homo Sapiens
aaataataggagcttaaaccc

SEQ ID NO: 43399 - DNA, 35 bp, Homo Sapiens; identical to SEQ ID NO: 529

SEQ ID NO: 43400 - DNA, 19 bp, Homo Sapiens
aaatcacgtcggggtcacc

SEQ ID NO: 43401 - DNA, 20 bp, Homo Sapiens
aaatcacgtcggggtcacca

SEQ ID NO: 43402 - DNA, 16 bp, Homo Sapiens
aaatcccggacgagcc

SEQ ID NO: 43403 - DNA, 17 bp, Homo Sapiens
aaatcccggacgagccc

SEQ ID NO: 43404 - DNA, 18 bp, Homo Sapiens
aaatcccggacgagcccc

SEQ ID NO: 43405 - DNA, 19 bp, Homo Sapiens
aaatcccggacgagccccc

SEQ ID NO: 43406 - DNA, 20 bp, Homo Sapiens
aaatcccggacgagccccca

SEQ ID NO: 43407 - DNA, 18 bp, Homo Sapiens
aaatctcgctggggcctc

SEQ ID NO: 43408 - DNA, 19 bp, Homo Sapiens
aaatctcgctggggcctcc

SEQ ID NO: 43409 - DNA, 16 bp, Homo Sapiens
aaatctcggtggaacc

SEQ ID NO: 43410 - DNA, 17 bp, Homo Sapiens
aaatctcggtggaacct

SEQ ID NO: 43411 - DNA, 18 bp, Homo Sapiens
aaatctcggtggaacctc

SEQ ID NO: 43412 - DNA, 19 bp, Homo Sapiens
aaatctcggtggaacctcc

SEQ ID NO: 43413 - DNA, 20 bp, Homo Sapiens
aaatctcggtggaacctcca

SEQ ID NO: 43414 - DNA, 17 bp, Homo Sapiens
aaatctcggtgggacct

SEQ ID NO: 43415 - DNA, 18 bp, Homo Sapiens
aaatctcggtgggacctc

SEQ ID NO: 43416 - DNA, 19 bp, Homo Sapiens
aaatctcggtgggacctcc

SEQ ID NO: 43417 - DNA, 18 bp, Homo Sapiens
aaatggtagagcgctcgc

SEQ ID NO: 43418 - DNA, 28 bp, Homo Sapiens
aaatgttggttatacccttcccgtacta

SEQ ID NO: 43419 - DNA, 29 bp, Homo Sapiens
aaatgttggttatacccttcccgtactac

SEQ ID NO: 43420 - DNA, 30 bp, Homo Sapiens; identical to SEQ ID NO: 627

SEQ ID NO: 43421 - DNA, 31 bp, Homo Sapiens; identical to SEQ ID NO: 628

SEQ ID NO: 43422 - DNA, 16 bp, Homo Sapiens
aaatgtttagacgggc

SEQ ID NO: 43423 - DNA, 17 bp, Homo Sapiens
aaatgtttagacgggct

SEQ ID NO: 43424 - DNA, 18 bp, Homo Sapiens
aaatgtttagacgggctc

SEQ ID NO: 43425 - DNA, 26 bp, Homo Sapiens
aaatgtttagacgggctcacatcacc

SEQ ID NO: 43426 - DNA, 27 bp, Homo Sapiens
aaatgtttagacgggctcacatcaccc

SEQ ID NO: 43427 - DNA, 29 bp, Homo Sapiens
aaatgtttagacgggctcacatcacccca

SEQ ID NO: 43428 - DNA, 35 bp, Homo Sapiens; identical to SEQ ID NO: 680

SEQ ID NO: 43429 - DNA, 36 bp, Homo Sapiens; identical to SEQ ID NO: 681

SEQ ID NO: 43430 - DNA, 22 bp, Homo Sapiens
aacaaaacgaatgatttcgact

SEQ ID NO: 43431 - DNA, 20 bp, Homo Sapiens
aacaacatggctttctcacc

SEQ ID NO: 43432 - DNA, 37 bp, Homo Sapiens
aacacaaagcacccaacttacacttaggagatttcaa

SEQ ID NO: 43433 - DNA, 18 bp, Homo Sapiens
aacacctctttacagtga

SEQ ID NO: 43434 - DNA, 19 bp, Homo Sapiens
aacacctctttacagtgac

SEQ ID NO: 43435 - DNA, 20 bp, Homo Sapiens
aacacctctttacagtgacc

SEQ ID NO: 43436 - DNA, 16 bp, Homo Sapiens
aacagaggcttacgac

SEQ ID NO: 43437 - DNA, 17 bp, Homo Sapiens
aacagaggcttacgacc

SEQ ID NO: 43438 - DNA, 30 bp, Homo Sapiens; identical to SEQ ID NO: 746

SEQ ID NO: 43439 - DNA, 31 bp, Homo Sapiens; identical to SEQ ID NO: 747

SEQ ID NO: 43440 - DNA, 18 bp, Homo Sapiens
aacagctatccattggtc

SEQ ID NO: 43441 - DNA, 34 bp, Homo Sapiens; identical to SEQ ID NO: 771

SEQ ID NO: 43442 - DNA, 36 bp, Homo Sapiens; identical to SEQ ID NO: 773

SEQ ID NO: 43443 - DNA, 37 bp, Homo Sapiens; identical to SEQ ID NO: 774

SEQ ID NO: 43444 - DNA, 38 bp, Homo Sapiens; identical to SEQ ID NO: 775

SEQ ID NO: 43445 - DNA, 33 bp, Homo Sapiens; identical to SEQ ID NO: 776

SEQ ID NO: 43446 - DNA, 34 bp, Homo Sapiens; identical to SEQ ID NO: 777

SEQ ID NO: 43447 - DNA, 35 bp, Homo Sapiens; identical to SEQ ID NO: 778

SEQ ID NO: 43448 - DNA, 36 bp, Homo Sapiens; identical to SEQ ID NO: 779

SEQ ID NO: 43449 - DNA, 38 bp, Homo Sapiens; identical to SEQ ID NO: 781

SEQ ID NO: 43450 - DNA, 18 bp, Homo Sapiens
aacatcagattgtgaatc

SEQ ID NO: 43451 - DNA, 31 bp, Homo Sapiens; identical to SEQ ID NO: 800

SEQ ID NO: 43452 - DNA, 32 bp, Homo Sapiens; identical to SEQ ID NO: 801

SEQ ID NO: 43453 - DNA, 36 bp, Homo Sapiens; identical to SEQ ID NO: 805

SEQ ID NO: 43454 - DNA, 37 bp, Homo Sapiens; identical to SEQ ID NO: 806

SEQ ID NO: 43455 - DNA, 39 bp, Homo Sapiens; identical to SEQ ID NO: 808

SEQ ID NO: 43456 - DNA, 40 bp, Homo Sapiens; identical to SEQ ID NO: 809

SEQ ID NO: 43457 - DNA, 41 bp, Homo Sapiens; identical to SEQ ID NO: 810

SEQ ID NO: 43458 - DNA, 42 bp, Homo Sapiens; identical to SEQ ID NO: 811

SEQ ID NO: 43459 - DNA, 43 bp, Homo Sapiens; identical to SEQ ID NO: 812

SEQ ID NO: 43460 - DNA, 17 bp, Homo Sapiens
aacatggctttctcacc

SEQ ID NO: 43461 - DNA, 23 bp, Homo Sapiens
aaccaaaacatcagattgtgaat

SEQ ID NO: 43462 - DNA, 36 bp, Homo Sapiens; identical to SEQ ID NO: 840

SEQ ID NO: 43463 - DNA, 37 bp, Homo Sapiens; identical to SEQ ID NO: 841

SEQ ID NO: 43464 - DNA, 38 bp, Homo Sapiens; identical to SEQ ID NO: 842

SEQ ID NO: 43465 - DNA, 23 bp, Homo Sapiens
aaccaacacctctttacagtgac

SEQ ID NO: 43466 - DNA, 24 bp, Homo Sapiens
aaccaacacctctttacagtgacc

SEQ ID NO: 43467 - DNA, 25 bp, Homo Sapiens
aaccaacacctctttacagtgacca

SEQ ID NO: 43468 - DNA, 36 bp, Homo Sapiens; identical to SEQ ID NO: 869

SEQ ID NO: 43469 - DNA, 17 bp, Homo Sapiens
aaccatcctctgctacc

SEQ ID NO: 43470 - DNA, 18 bp, Homo Sapiens
aaccatcctctgctacca

SEQ ID NO: 43471 - DNA, 20 bp, Homo Sapiens
aacccagaggtcgatggatc

SEQ ID NO: 43472 - DNA, 21 bp, Homo Sapiens
aacccagaggtcgatggatcg

SEQ ID NO: 43473 - DNA, 22 bp, Homo Sapiens
aacccagaggtcgatggatcga

SEQ ID NO: 43474 - DNA, 18 bp, Homo Sapiens
aaccccactcctggtacc

SEQ ID NO: 43475 - DNA, 19 bp, Homo Sapiens
aaccccactcctggtacca

SEQ ID NO: 43476 - DNA, 19 bp, Homo Sapiens
aaccctgctcgctgcgcca

SEQ ID NO: 43477 - DNA, 39 bp, Homo Sapiens; identical to SEQ ID NO: 913

SEQ ID NO: 43478 - DNA, 35 bp, Homo Sapiens; identical to SEQ ID NO: 31426

SEQ ID NO: 43479 - DNA, 36 bp, Homo Sapiens; identical to SEQ ID NO: 918

SEQ ID NO: 43480 - DNA, 37 bp, Homo Sapiens; identical to SEQ ID NO: 919

SEQ ID NO: 43481 - DNA, 35 bp, Homo Sapiens
aaccgaagatcgcgggttcgaaccccgtccgtgcc

SEQ ID NO: 43482 - DNA, 36 bp, Homo Sapiens; identical to SEQ ID NO: 929

SEQ ID NO: 43483 - DNA, 37 bp, Homo Sapiens; identical to SEQ ID NO: 930

SEQ ID NO: 43484 - DNA, 38 bp, Homo Sapiens; identical to SEQ ID NO: 931

SEQ ID NO: 43485 - DNA, 16 bp, Homo Sapiens
aaccgagcggaaacac

SEQ ID NO: 43486 - DNA, 30 bp, Homo Sapiens; identical to SEQ ID NO: 946

SEQ ID NO: 43487 - DNA, 32 bp, Homo Sapiens; identical to SEQ ID NO: 948

SEQ ID NO: 43488 - DNA, 33 bp, Homo Sapiens; identical to SEQ ID NO: 949

SEQ ID NO: 43489 - DNA, 34 bp, Homo Sapiens; identical to SEQ ID NO: 950

SEQ ID NO: 43490 - DNA, 17 bp, Homo Sapiens
aaccgggcagaaacacc

SEQ ID NO: 43491 - DNA, 16 bp, Homo Sapiens
aaccgggcagaagcac

SEQ ID NO: 43492 - DNA, 17 bp, Homo Sapiens
aaccgggcagaagcacc

SEQ ID NO: 43493 - DNA, 18 bp, Homo Sapiens
aaccgggcagaagcacca

SEQ ID NO: 43494 - DNA, 16 bp, Homo Sapiens
aaccgggcggaaacac

SEQ ID NO: 43495 - DNA, 17 bp, Homo Sapiens
aaccgggcggaaacacc

SEQ ID NO: 43496 - DNA, 18 bp, Homo Sapiens
aaccgggcggaaacacca

SEQ ID NO: 43497 - DNA, 18 bp, Homo Sapiens
aacctcagagggggcacc

SEQ ID NO: 43498 - DNA, 18 bp, Homo Sapiens
aacctcggttcgaatccg

SEQ ID NO: 43499 - DNA, 29 bp, Homo Sapiens
aacctcggttcgaatccgagtcacggcac

SEQ ID NO: 43500 - DNA, 16 bp, Homo Sapiens
aacctgccggggcttc

SEQ ID NO: 43501 - DNA, 17 bp, Homo Sapiens
aacctgccggggcttcc

SEQ ID NO: 43502 - DNA, 17 bp, Homo Sapiens
aacctttttccaaggac

SEQ ID NO: 43503 - DNA, 17 bp, Homo Sapiens
aacgaatgatttcgact

SEQ ID NO: 43504 - DNA, 18 bp, Homo Sapiens
aacgaatgatttcgactc

SEQ ID NO: 43505 - DNA, 39 bp, Homo Sapiens; identical to SEQ ID NO: 1012

SEQ ID NO: 43506 - DNA, 47 bp, Homo Sapiens; identical to SEQ ID NO: 1019

SEQ ID NO: 43507 - DNA, 39 bp, Homo Sapiens; identical to SEQ ID NO: 1022

SEQ ID NO: 43508 - DNA, 31 bp, Homo Sapiens; identical to SEQ ID NO: 1069

SEQ ID NO: 43509 - DNA, 32 bp, Homo Sapiens; identical to SEQ ID NO: 1070

SEQ ID NO: 43510 - DNA, 39 bp, Homo Sapiens; identical to SEQ ID NO: 1077

SEQ ID NO: 43511 - DNA, 40 bp, Homo Sapiens; identical to SEQ ID NO: 1078

SEQ ID NO: 43512 - DNA, 33 bp, Homo Sapiens; identical to SEQ ID NO: 1100

SEQ ID NO: 43513 - DNA, 36 bp, Homo Sapiens; identical to SEQ ID NO: 1103

SEQ ID NO: 43514 - DNA, 37 bp, Homo Sapiens; identical to SEQ ID NO: 1104

SEQ ID NO: 43515 - DNA, 38 bp, Homo Sapiens; identical to SEQ ID NO: 1105

SEQ ID NO: 43516 - DNA, 44 bp, Homo Sapiens; identical to SEQ ID NO: 1111

SEQ ID NO: 43517 - DNA, 46 bp, Homo Sapiens; identical to SEQ ID NO: 1113

SEQ ID NO: 43518 - DNA, 47 bp, Homo Sapiens; identical to SEQ ID NO: 1114

SEQ ID NO: 43519 - DNA, 17 bp, Homo Sapiens
aactgggcggaaacacc

SEQ ID NO: 43520 - DNA, 38 bp, Homo Sapiens; identical to SEQ ID NO: 1126

SEQ ID NO: 43521 - DNA, 17 bp, Homo Sapiens
aacttaacttgaccgct

SEQ ID NO: 43522 - DNA, 18 bp, Homo Sapiens
aacttaacttgaccgctc

SEQ ID NO: 43523 - DNA, 20 bp, Homo Sapiens
aacttaacttgaccgctctg

SEQ ID NO: 43524 - DNA, 21 bp, Homo Sapiens
aacttaacttgaccgctctga

SEQ ID NO: 43525 - DNA, 22 bp, Homo Sapiens
aacttaacttgaccgctctgac

SEQ ID NO: 43526 - DNA, 23 bp, Homo Sapiens
aacttaacttgaccgctctgacc

SEQ ID NO: 43527 - DNA, 24 bp, Homo Sapiens
aacttaacttgaccgctctgacca

SEQ ID NO: 43528 - DNA, 16 bp, Homo Sapiens
aacttacacttaggag

SEQ ID NO: 43529 - DNA, 35 bp, Homo Sapiens; identical to SEQ ID NO: 1156

SEQ ID NO: 43530 - DNA, 39 bp, Homo Sapiens; identical to SEQ ID NO: 1160

SEQ ID NO: 43531 - DNA, 40 bp, Homo Sapiens; identical to SEQ ID NO: 1161

SEQ ID NO: 43532 - DNA, 41 bp, Homo Sapiens; identical to SEQ ID NO: 1162

SEQ ID NO: 43533 - DNA, 42 bp, Homo Sapiens; identical to SEQ ID NO: 1163

SEQ ID NO: 43534 - DNA, 43 bp, Homo Sapiens; identical to SEQ ID NO: 1164

SEQ ID NO: 43535 - DNA, 44 bp, Homo Sapiens; identical to SEQ ID NO: 1165

SEQ ID NO: 43536 - DNA, 45 bp, Homo Sapiens; identical to SEQ ID NO: 1166

SEQ ID NO: 43537 - DNA, 16 bp, Homo Sapiens
aacttgaccgctctga

SEQ ID NO: 43538 - DNA, 17 bp, Homo Sapiens
aacttgaccgctctgac

SEQ ID NO: 43539 - DNA, 18 bp, Homo Sapiens
aacttgaccgctctgacc

SEQ ID NO: 43540 - DNA, 19 bp, Homo Sapiens
aacttgaccgctctgacca

SEQ ID NO: 43541 - DNA, 27 bp, Homo Sapiens
aactttgtcaaagttaaattataggct

SEQ ID NO: 43542 - DNA, 20 bp, Homo Sapiens
aagaactgctaactcatgcc

SEQ ID NO: 43543 - DNA, 22 bp, Homo Sapiens
aagaactgctaactcatgcccc

SEQ ID NO: 43544 - DNA, 23 bp, Homo Sapiens
aagaactgctaactcatgccccc

SEQ ID NO: 43545 - DNA, 25 bp, Homo Sapiens
aagaactgctaactcatgcccccat

SEQ ID NO: 43546 - DNA, 26 bp, Homo Sapiens
aagaactgctaactcatgcccccatg

SEQ ID NO: 43547 - DNA, 27 bp, Homo Sapiens
aagaactgctaactcatgcccccatgt

SEQ ID NO: 43548 - DNA, 28 bp, Homo Sapiens
aagaactgctaactcatgcccccatgtc

SEQ ID NO: 43549 - DNA, 29 bp, Homo Sapiens
aagaactgctaactcatgcccccatgtct

SEQ ID NO: 43550 - DNA, 30 bp, Homo Sapiens; identical to SEQ ID NO: 1227

SEQ ID NO: 43551 - DNA, 32 bp, Homo Sapiens; identical to SEQ ID NO: 1229

SEQ ID NO: 43552 - DNA, 33 bp, Homo Sapiens; identical to SEQ ID NO: 1230

SEQ ID NO: 43553 - DNA, 36 bp, Homo Sapiens; identical to SEQ ID NO: 1233

SEQ ID NO: 43554 - DNA, 38 bp, Homo Sapiens; identical to SEQ ID NO: 1235

SEQ ID NO: 43555 - DNA, 39 bp, Homo Sapiens; identical to SEQ ID NO: 1236

SEQ ID NO: 43556 - DNA, 40 bp, Homo Sapiens; identical to SEQ ID NO: 1237

SEQ ID NO: 43557 - DNA, 41 bp, Homo Sapiens; identical to SEQ ID NO: 1238

SEQ ID NO: 43558 - DNA, 42 bp, Homo Sapiens; identical to SEQ ID NO: 1239

SEQ ID NO: 43559 - DNA, 43 bp, Homo Sapiens; identical to SEQ ID NO: 1240

SEQ ID NO: 43560 - DNA, 44 bp, Homo Sapiens; identical to SEQ ID NO: 1241

SEQ ID NO: 43561 - DNA, 45 bp, Homo Sapiens; identical to SEQ ID NO: 1242

SEQ ID NO: 43562 - DNA, 46 bp, Homo Sapiens; identical to SEQ ID NO: 1243

SEQ ID NO: 43563 - DNA, 47 bp, Homo Sapiens; identical to SEQ ID NO: 1244

SEQ ID NO: 43564 - DNA, 20 bp, Homo Sapiens
aagaagcagcttcaaacctg

SEQ ID NO: 43565 - DNA, 27 bp, Homo Sapiens
aagaagcagcttcaaacctgccggggc

SEQ ID NO: 43566 - DNA, 28 bp, Homo Sapiens
aagaagcagcttcaaacctgccggggct

SEQ ID NO: 43567 - DNA, 29 bp, Homo Sapiens
aagaagcagcttcaaacctgccggggctt

SEQ ID NO: 43568 - DNA, 30 bp, Homo Sapiens; identical to SEQ ID NO: 1254

SEQ ID NO: 43569 - DNA, 31 bp, Homo Sapiens; identical to SEQ ID NO: 1255

SEQ ID NO: 43570 - DNA, 32 bp, Homo Sapiens; identical to SEQ ID NO: 1256

SEQ ID NO: 43571 - DNA, 23 bp, Homo Sapiens
aagacaggggttaggcctctttt

SEQ ID NO: 43572 - DNA, 16 bp, Homo Sapiens
aagactttttctctga

SEQ ID NO: 43573 - DNA, 17 bp, Homo Sapiens
aagactttttctctgac

SEQ ID NO: 43574 - DNA, 18 bp, Homo Sapiens
aagactttttctctgacc

SEQ ID NO: 43575 - DNA, 19 bp, Homo Sapiens
aagactttttctctgacca

SEQ ID NO: 43576 - DNA, 28 bp, Homo Sapiens
aagagaaccaacacctctttacagtgac

SEQ ID NO: 43577 - DNA, 29 bp, Homo Sapiens
aagagaaccaacacctctttacagtgacc

SEQ ID NO: 43578 - DNA, 30 bp, Homo Sapiens; identical to SEQ ID NO: 1283

SEQ ID NO: 43579 - DNA, 35 bp, Homo Sapiens; identical to SEQ ID NO: 1295

SEQ ID NO: 43580 - DNA, 21 bp, Homo Sapiens
aagattaagagaaccaacacc

SEQ ID NO: 43581 - DNA, 34 bp, Homo Sapiens; identical to SEQ ID NO: 1345

SEQ ID NO: 43582 - DNA, 35 bp, Homo Sapiens; identical to SEQ ID NO: 1346

SEQ ID NO: 43583 - DNA, 36 bp, Homo Sapiens; identical to SEQ ID NO: 1347

SEQ ID NO: 43584 - DNA, 22 bp, Homo Sapiens
aagattccaggttcgactcctg

SEQ ID NO: 43585 - DNA, 29 bp, Homo Sapiens
aagattccaggttcgactcctggctggct

SEQ ID NO: 43586 - DNA, 30 bp, Homo Sapiens; identical to SEQ ID NO: 1352

SEQ ID NO: 43587 - DNA, 31 bp, Homo Sapiens; identical to SEQ ID NO: 1353

SEQ ID NO: 43588 - DNA, 33 bp, Homo Sapiens; identical to SEQ ID NO: 1362

SEQ ID NO: 43589 - DNA, 33 bp, Homo Sapiens; identical to SEQ ID NO: 1365

SEQ ID NO: 43590 - DNA, 20 bp, Homo Sapiens
aagattgagggttcgagtcc

SEQ ID NO: 43591 - DNA, 22 bp, Homo Sapiens
aagattgagggttcgagtccct

SEQ ID NO: 43592 - DNA, 32 bp, Homo Sapiens; identical to SEQ ID NO: 1371

SEQ ID NO: 43593 - DNA, 33 bp, Homo Sapiens; identical to SEQ ID NO: 1372

SEQ ID NO: 43594 - DNA, 34 bp, Homo Sapiens; identical to SEQ ID NO: 1373

SEQ ID NO: 43595 - DNA, 22 bp, Homo Sapiens
aagattgcaggttcgagtcctg

SEQ ID NO: 43596 - DNA, 30 bp, Homo Sapiens; identical to SEQ ID NO: 1376

SEQ ID NO: 43597 - DNA, 31 bp, Homo Sapiens; identical to SEQ ID NO: 1377

SEQ ID NO: 43598 - DNA, 32 bp, Homo Sapiens; identical to SEQ ID NO: 1378

SEQ ID NO: 43599 - DNA, 33 bp, Homo Sapiens; identical to SEQ ID NO: 1379

SEQ ID NO: 43600 - DNA, 34 bp, Homo Sapiens; identical to SEQ ID NO: 1380

SEQ ID NO: 43601 - DNA, 31 bp, Homo Sapiens; identical to SEQ ID NO: 1382

SEQ ID NO: 43602 - DNA, 24 bp, Homo Sapiens
aagcagcttcaaacctgccggggc

SEQ ID NO: 43603 - DNA, 25 bp, Homo Sapiens
aagcagcttcaaacctgccggggct

SEQ ID NO: 43604 - DNA, 26 bp, Homo Sapiens
aagcagcttcaaacctgccggggctt

SEQ ID NO: 43605 - DNA, 27 bp, Homo Sapiens
aagcagcttcaaacctgccggggcttc

SEQ ID NO: 43606 - DNA, 28 bp, Homo Sapiens
aagcagcttcaaacctgccggggcttcc

SEQ ID NO: 43607 - DNA, 30 bp, Homo Sapiens; identical to SEQ ID NO: 1421

SEQ ID NO: 43608 - DNA, 33 bp, Homo Sapiens; identical to SEQ ID NO: 1424

SEQ ID NO: 43609 - DNA, 38 bp, Homo Sapiens; identical to SEQ ID NO: 1428

SEQ ID NO: 43610 - DNA, 20 bp, Homo Sapiens
aagcattggactgtaaatct

SEQ ID NO: 43611 - DNA, 20 bp, Homo Sapiens
aagccagggattgtgggttc

SEQ ID NO: 43612 - DNA, 21 bp, Homo Sapiens
aagccagggattgtgggttcg

SEQ ID NO: 43613 - DNA, 37 bp, Homo Sapiens; identical to SEQ ID NO: 1465

SEQ ID NO: 43614 - DNA, 39 bp, Homo Sapiens; identical to SEQ ID NO: 1467

SEQ ID NO: 43615 - DNA, 39 bp, Homo Sapiens; identical to SEQ ID NO: 1471

SEQ ID NO: 43616 - DNA, 39 bp, Homo Sapiens; identical to SEQ ID NO: 1475

SEQ ID NO: 43617 - DNA, 37 bp, Homo Sapiens; identical to SEQ ID NO: 1482

SEQ ID NO: 43618 - DNA, 38 bp, Homo Sapiens; identical to SEQ ID NO: 1483

SEQ ID NO: 43619 - DNA, 39 bp, Homo Sapiens; identical to SEQ ID NO: 1484

SEQ ID NO: 43620 - DNA, 40 bp, Homo Sapiens; identical to SEQ ID NO: 1485

SEQ ID NO: 43621 - DNA, 22 bp, Homo Sapiens
aagcgtgctgggcccataaccc

SEQ ID NO: 43622 - DNA, 19 bp, Homo Sapiens
aagctatcgggcccatacc

SEQ ID NO: 43623 - DNA, 23 bp, Homo Sapiens
aagctatcgggcccataccccga

SEQ ID NO: 43624 - DNA, 41 bp, Homo Sapiens; identical to SEQ ID NO: 1548

SEQ ID NO: 43625 - DNA, 24 bp, Homo Sapiens
aaggataacagctatccattggtc

SEQ ID NO: 43626 - DNA, 30 bp, Homo Sapiens; identical to SEQ ID NO: 1566

SEQ ID NO: 43627 - DNA, 19 bp, Homo Sapiens
aaggctgcgtgttcgaatc

SEQ ID NO: 43628 - DNA, 22 bp, Homo Sapiens
aaggctgcgtgttcgaatcacg

SEQ ID NO: 43629 - DNA, 24 bp, Homo Sapiens
aaggctgcgtgttcgaatcacgtc

SEQ ID NO: 43630 - DNA, 26 bp, Homo Sapiens
aaggctgcgtgttcgaatcacgtcgg

SEQ ID NO: 43631 - DNA, 27 bp, Homo Sapiens
aaggctgcgtgttcgaatcacgtcggg

SEQ ID NO: 43632 - DNA, 28 bp, Homo Sapiens
aaggctgcgtgttcgaatcacgtcgggg

SEQ ID NO: 43633 - DNA, 30 bp, Homo Sapiens; identical to SEQ ID NO: 1575

SEQ ID NO: 43634 - DNA, 33 bp, Homo Sapiens; identical to SEQ ID NO: 1576

SEQ ID NO: 43635 - DNA, 22 bp, Homo Sapiens
aagggcttagcttaattaaagt

SEQ ID NO: 43636 - DNA, 25 bp, Homo Sapiens
aagggcttagcttaattaaagtggc

SEQ ID NO: 43637 - DNA, 38 bp, Homo Sapiens; identical to SEQ ID NO: 1613

SEQ ID NO: 43638 - DNA, 40 bp, Homo Sapiens; identical to SEQ ID NO: 1615

SEQ ID NO: 43639 - DNA, 27 bp, Homo Sapiens
aaggtccccggttcgaaaccgggcgga

SEQ ID NO: 43640 - DNA, 30 bp, Homo Sapiens; identical to SEQ ID NO: 1632

SEQ ID NO: 43641 - DNA, 31 bp, Homo Sapiens; identical to SEQ ID NO: 31607

SEQ ID NO: 43642 - DNA, 32 bp, Homo Sapiens; identical to SEQ ID NO: 1633

SEQ ID NO: 43643 - DNA, 33 bp, Homo Sapiens; identical to SEQ ID NO: 31609

SEQ ID NO: 43644 - DNA, 30 bp, Homo Sapiens
aaggtccccggttcgatcccgggcggaaac

SEQ ID NO: 43645 - DNA, 32 bp, Homo Sapiens; identical to SEQ ID NO: 1634

SEQ ID NO: 43646 - DNA, 34 bp, Homo Sapiens
aaggtccctggttcgatcccgggtttcggcacca

SEQ ID NO: 43647 - DNA, 29 bp, Homo Sapiens
aaggtcctgggttcgagccccagtggaac

SEQ ID NO: 43648 - DNA, 30 bp, Homo Sapiens; identical to SEQ ID NO: 1644

SEQ ID NO: 43649 - DNA, 31 bp, Homo Sapiens; identical to SEQ ID NO: 31615

SEQ ID NO: 43650 - DNA, 32 bp, Homo Sapiens; identical to SEQ ID NO: 31616

SEQ ID NO: 43651 - DNA, 33 bp, Homo Sapiens; identical to SEQ ID NO: 1645

SEQ ID NO: 43652 - DNA, 34 bp, Homo Sapiens; identical to SEQ ID NO: 1646

SEQ ID NO: 43653 - DNA, 29 bp, Homo Sapiens
aaggtcgcgggttcgatccccgtacgggc

SEQ ID NO: 43654 - DNA, 30 bp, Homo Sapiens; identical to SEQ ID NO: 1651

SEQ ID NO: 43655 - DNA, 33 bp, Homo Sapiens; identical to SEQ ID NO: 1654

SEQ ID NO: 43656 - DNA, 24 bp, Homo Sapiens
aaggttccgggttcgagtcccggc

SEQ ID NO: 43657 - DNA, 30 bp, Homo Sapiens; identical to SEQ ID NO: 1661

SEQ ID NO: 43658 - DNA, 31 bp, Homo Sapiens; identical to SEQ ID NO: 1662

SEQ ID NO: 43659 - DNA, 32 bp, Homo Sapiens; identical to SEQ ID NO: 1663

SEQ ID NO: 43660 - DNA, 33 bp, Homo Sapiens; identical to SEQ ID NO: 1664

SEQ ID NO: 43661 - DNA, 34 bp, Homo Sapiens; identical to SEQ ID NO: 1665

SEQ ID NO: 43662 - DNA, 33 bp, Homo Sapiens; identical to SEQ ID NO: 1670

SEQ ID NO: 43663 - DNA, 34 bp, Homo Sapiens
aaggttggtggttcgagcccacccagggacgcca

SEQ ID NO: 43664 - DNA, 32 bp, Homo Sapiens; identical to SEQ ID NO: 31635

SEQ ID NO: 43665 - DNA, 33 bp, Homo Sapiens; identical to SEQ ID NO: 1671

SEQ ID NO: 43666 - DNA, 33 bp, Homo Sapiens; identical to SEQ ID NO: 1674

SEQ ID NO: 43667 - DNA, 19 bp, Homo Sapiens
aagtcacgtcggggtcacc

SEQ ID NO: 43668 - DNA, 20 bp, Homo Sapiens
aagtcacgtcggggtcacca

SEQ ID NO: 43669 - DNA, 17 bp, Homo Sapiens
aagtcatggaggccatg

SEQ ID NO: 43670 - DNA, 20 bp, Homo Sapiens
aagtcatggaggccatgggg

SEQ ID NO: 43671 - DNA, 20 bp, Homo Sapiens
aagtcccattggtctagcca

SEQ ID NO: 43672 - DNA, 16 bp, Homo Sapiens
aagtccctgttcgggc

SEQ ID NO: 43673 - DNA, 17 bp, Homo Sapiens
aagtccctgttcgggcg

SEQ ID NO: 43674 - DNA, 18 bp, Homo Sapiens
aagtccctgttcgggcgc

SEQ ID NO: 43675 - DNA, 19 bp, Homo Sapiens
aagtccctgttcgggcgcc

SEQ ID NO: 43676 - DNA, 20 bp, Homo Sapiens
aagtccctgttcgggcgcca

SEQ ID NO: 43677 - DNA, 34 bp, Homo Sapiens; identical to SEQ ID NO: 1712

SEQ ID NO: 43678 - DNA, 35 bp, Homo Sapiens; identical to SEQ ID NO: 1713

SEQ ID NO: 43679 - DNA, 36 bp, Homo Sapiens; identical to SEQ ID NO: 1714

SEQ ID NO: 43680 - DNA, 28 bp, Homo Sapiens
aagttaaagattaagagaaccaacacct

SEQ ID NO: 43681 - DNA, 41 bp, Homo Sapiens; identical to SEQ ID NO: 1733

SEQ ID NO: 43682 - DNA, 22 bp, Homo Sapiens
aagttgcaatacttaatttctg

SEQ ID NO: 43683 - DNA, 17 bp, Homo Sapiens
aataagctatcgggccc

SEQ ID NO: 43684 - DNA, 19 bp, Homo Sapiens
aataataggagcttaaacc

SEQ ID NO: 43685 - DNA, 34 bp, Homo Sapiens; identical to SEQ ID NO: 1787

SEQ ID NO: 43686 - DNA, 40 bp, Homo Sapiens; identical to SEQ ID NO: 1799

SEQ ID NO: 43687 - DNA, 44 bp, Homo Sapiens; identical to SEQ ID NO: 1801

SEQ ID NO: 43688 - DNA, 31 bp, Homo Sapiens; identical to SEQ ID NO: 1813

SEQ ID NO: 43689 - DNA, 37 bp, Homo Sapiens; identical to SEQ ID NO: 1819

SEQ ID NO: 43690 - DNA, 17 bp, Homo Sapiens
aatacttaatttctgcc

SEQ ID NO: 43691 - DNA, 18 bp, Homo Sapiens
aatacttaatttctgcca

SEQ ID NO: 43692 - DNA, 17 bp, Homo Sapiens
aataggagcttaaaccc

SEQ ID NO: 43693 - DNA, 19 bp, Homo Sapiens
aataggagcttaaaccccc

SEQ ID NO: 43694 - DNA, 31 bp, Homo Sapiens; identical to SEQ ID NO: 1853

SEQ ID NO: 43695 - DNA, 16 bp, Homo Sapiens
aatagtaccgttaact

SEQ ID NO: 43696 - DNA, 16 bp, Homo Sapiens
aatcacgtcggggtca

SEQ ID NO: 43697 - DNA, 17 bp, Homo Sapiens
aatcacgtcggggtcac

SEQ ID NO: 43698 - DNA, 18 bp, Homo Sapiens
aatcacgtcggggtcacc

SEQ ID NO: 43699 - DNA, 19 bp, Homo Sapiens
aatcacgtcggggtcacca

SEQ ID NO: 43700 - DNA, 18 bp, Homo Sapiens
aatccagcgatccgagtt

SEQ ID NO: 43701 - DNA, 19 bp, Homo Sapiens
aatccagcgatccgagttc

SEQ ID NO: 43702 - DNA, 20 bp, Homo Sapiens
aatccagcgatccgagttca

SEQ ID NO: 43703 - DNA, 21 bp, Homo Sapiens
aatccagcgatccgagttcaa

SEQ ID NO: 43704 - DNA, 22 bp, Homo Sapiens
aatccagcgatccgagttcaaa

SEQ ID NO: 43705 - DNA, 23 bp, Homo Sapiens
aatccagcgatccgagttcaaat

SEQ ID NO: 43706 - DNA, 36 bp, Homo Sapiens; identical to SEQ ID NO: 1913

SEQ ID NO: 43707 - DNA, 38 bp, Homo Sapiens; identical to SEQ ID NO: 1915

SEQ ID NO: 43708 - DNA, 22 bp, Homo Sapiens
aatccattggggtttccccgcg

SEQ ID NO: 43709 - DNA, 23 bp, Homo Sapiens
aatccattggggtttccccgcgc

SEQ ID NO: 43710 - DNA, 26 bp, Homo Sapiens
aatccattggggtttccccgcgcagg

SEQ ID NO: 43711 - DNA, 27 bp, Homo Sapiens
aatccattggggtttccccgcgcaggt

SEQ ID NO: 43712 - DNA, 41 bp, Homo Sapiens; identical to SEQ ID NO: 1957

SEQ ID NO: 43713 - DNA, 42 bp, Homo Sapiens; identical to SEQ ID NO: 1958

SEQ ID NO: 43714 - DNA, 43 bp, Homo Sapiens; identical to SEQ ID NO: 1959

SEQ ID NO: 43715 - DNA, 17 bp, Homo Sapiens
aatcccaccgctgccac

SEQ ID NO: 43716 - DNA, 18 bp, Homo Sapiens
aatcccaccgctgccacc

SEQ ID NO: 43717 - DNA, 18 bp, Homo Sapiens
aatcccactcctgacacc

SEQ ID NO: 43718 - DNA, 19 bp, Homo Sapiens
aatcccactcctgacacca

SEQ ID NO: 43719 - DNA, 16 bp, Homo Sapiens
aatcccacttctgaca

SEQ ID NO: 43720 - DNA, 17 bp, Homo Sapiens
aatcccacttctgacac

SEQ ID NO: 43721 - DNA, 18 bp, Homo Sapiens
aatcccacttctgacacc

SEQ ID NO: 43722 - DNA, 19 bp, Homo Sapiens
aatcccagcggggcctcca

SEQ ID NO: 43723 - DNA, 16 bp, Homo Sapiens
aatcccagcggtgcct

SEQ ID NO: 43724 - DNA, 17 bp, Homo Sapiens
aatcccagcggtgcctc

SEQ ID NO: 43725 - DNA, 18 bp, Homo Sapiens
aatcccagcggtgcctcc

SEQ ID NO: 43726 - DNA, 19 bp, Homo Sapiens
aatcccagcggtgcctcca

SEQ ID NO: 43727 - DNA, 17 bp, Homo Sapiens
aatcccatcctcgtcgc

SEQ ID NO: 43728 - DNA, 18 bp, Homo Sapiens
aatcccatcctcgtcgcc

SEQ ID NO: 43729 - DNA, 19 bp, Homo Sapiens
aatcccatcctcgtcgcca

SEQ ID NO: 43730 - DNA, 19 bp, Homo Sapiens
aatccccggcacctccacc

SEQ ID NO: 43731 - DNA, 20 bp, Homo Sapiens
aatccccggcacctccacca

SEQ ID NO: 43732 - DNA, 16 bp, Homo Sapiens
aatcccggacgagccc

SEQ ID NO: 43733 - DNA, 17 bp, Homo Sapiens
aatcccggacgagcccc

SEQ ID NO: 43734 - DNA, 18 bp, Homo Sapiens
aatcccggacgagccccc

SEQ ID NO: 43735 - DNA, 19 bp, Homo Sapiens
aatcccggacgagccccca

SEQ ID NO: 43736 - DNA, 18 bp, Homo Sapiens
aatcccgggtttcggcac

SEQ ID NO: 43737 - DNA, 17 bp, Homo Sapiens
aatccgagtcacggcac

SEQ ID NO: 43738 - DNA, 18 bp, Homo Sapiens
aatccgagtcacggcacc

SEQ ID NO: 43739 - DNA, 19 bp, Homo Sapiens
aatccgagtcacggcacca

SEQ ID NO: 43740 - DNA, 17 bp, Homo Sapiens
aatccggctcgaaggac

SEQ ID NO: 43741 - DNA, 18 bp, Homo Sapiens
aatccggctcgaaggacc

SEQ ID NO: 43742 - DNA, 18 bp, Homo Sapiens
aatccggctcggaggacc

SEQ ID NO: 43743 - DNA, 17 bp, Homo Sapiens
aatccgggtgccccctc

SEQ ID NO: 43744 - DNA, 18 bp, Homo Sapiens
aatccgggtgccccctcc

SEQ ID NO: 43745 - DNA, 17 bp, Homo Sapiens
aatcctgccgactacgc

SEQ ID NO: 43746 - DNA, 18 bp, Homo Sapiens
aatcctgccgactacgcc

SEQ ID NO: 43747 - DNA, 19 bp, Homo Sapiens
aatcctgccgactacgcca

SEQ ID NO: 43748 - DNA, 17 bp, Homo Sapiens
aatcctgttcgtgacgc

SEQ ID NO: 43749 - DNA, 18 bp, Homo Sapiens
aatcctgttcgtgacgcc

SEQ ID NO: 43750 - DNA, 37 bp, Homo Sapiens; identical to SEQ ID NO: 2042

SEQ ID NO: 43751 - DNA, 39 bp, Homo Sapiens; identical to SEQ ID NO: 2048

SEQ ID NO: 43752 - DNA, 16 bp, Homo Sapiens
aatctcgctggggcct

SEQ ID NO: 43753 - DNA, 17 bp, Homo Sapiens
aatctcgctggggcctc

SEQ ID NO: 43754 - DNA, 18 bp, Homo Sapiens
aatctcgctggggcctcc

SEQ ID NO: 43755 - DNA, 16 bp, Homo Sapiens
aatctcggtggaacct

SEQ ID NO: 43756 - DNA, 17 bp, Homo Sapiens
aatctcggtggaacctc

SEQ ID NO: 43757 - DNA, 18 bp, Homo Sapiens
aatctcggtggaacctcc

SEQ ID NO: 43758 - DNA, 19 bp, Homo Sapiens
aatctcggtggaacctcca

SEQ ID NO: 43759 - DNA, 16 bp, Homo Sapiens
aatctcggtgggacct

SEQ ID NO: 43760 - DNA, 17 bp, Homo Sapiens
aatctcggtgggacctc

SEQ ID NO: 43761 - DNA, 18 bp, Homo Sapiens
aatctcggtgggacctcc

SEQ ID NO: 43762 - DNA, 19 bp, Homo Sapiens
aatctcggtgggacctcca

SEQ ID NO: 43763 - DNA, 39 bp, Homo Sapiens; identical to SEQ ID NO: 2086

SEQ ID NO: 43764 - DNA, 39 bp, Homo Sapiens; identical to SEQ ID NO: 2094

SEQ ID NO: 43765 - DNA, 37 bp, Homo Sapiens; identical to SEQ ID NO: 2110

SEQ ID NO: 43766 - DNA, 38 bp, Homo Sapiens; identical to SEQ ID NO: 2111

SEQ ID NO: 43767 - DNA, 39 bp, Homo Sapiens; identical to SEQ ID NO: 2112

SEQ ID NO: 43768 - DNA, 24 bp, Homo Sapiens
aatgccgaggttgtgagttcgagc

SEQ ID NO: 43769 - DNA, 34 bp, Homo Sapiens; identical to SEQ ID NO: 2160

SEQ ID NO: 43770 - DNA, 35 bp, Homo Sapiens; identical to SEQ ID NO: 2161

SEQ ID NO: 43771 - DNA, 36 bp, Homo Sapiens; identical to SEQ ID NO: 2162

SEQ ID NO: 43772 - DNA, 18 bp, Homo Sapiens
aatggataacgcgtctga

SEQ ID NO: 43773 - DNA, 20 bp, Homo Sapiens
aatggataacgcgtctgact

SEQ ID NO: 43774 - DNA, 16 bp, Homo Sapiens
aatggataaggcactg

SEQ ID NO: 43775 - DNA, 20 bp, Homo Sapiens
aatggataaggcatcagcct

SEQ ID NO: 43776 - DNA, 22 bp, Homo Sapiens
aatggataaggcatcagcctcc

SEQ ID NO: 43777 - DNA, 37 bp, Homo Sapiens; identical to SEQ ID NO: 31782

SEQ ID NO: 43778 - DNA, 16 bp, Homo Sapiens
aatggataaggcattg

SEQ ID NO: 43779 - DNA, 18 bp, Homo Sapiens
aatggataaggcattggc

SEQ ID NO: 43780 - DNA, 18 bp, Homo Sapiens
aatggataaggcgtctga

SEQ ID NO: 43781 - DNA, 27 bp, Homo Sapiens
aatggataaggcgtctgacttcggatc

SEQ ID NO: 43782 - DNA, 22 bp, Homo Sapiens
aatggataaggcgtctgattcc

SEQ ID NO: 43783 - DNA, 16 bp, Homo Sapiens
aatggatagcgcattg

SEQ ID NO: 43784 - DNA, 17 bp, Homo Sapiens
aatggatagcgcattgg

SEQ ID NO: 43785 - DNA, 18 bp, Homo Sapiens
aatggatagcgcattgga

SEQ ID NO: 43786 - DNA, 19 bp, Homo Sapiens
aatggatagcgcattggac

SEQ ID NO: 43787 - DNA, 20 bp, Homo Sapiens
aatggatagcgcattggact

SEQ ID NO: 43788 - DNA, 22 bp, Homo Sapiens
aatggatagcgcattggacttc

SEQ ID NO: 43789 - DNA, 28 bp, Homo Sapiens
aatggatagcgcattggacttctaattc

SEQ ID NO: 43790 - DNA, 30 bp, Homo Sapiens
aatggatagcgcattggacttctaattcaa

SEQ ID NO: 43791 - DNA, 17 bp, Homo Sapiens
aatggtagaattctcgc

SEQ ID NO: 43792 - DNA, 18 bp, Homo Sapiens
aatggtagaattctcgcc

SEQ ID NO: 43793 - DNA, 17 bp, Homo Sapiens
aatggtagagcgctcgc

SEQ ID NO: 43794 - DNA, 20 bp, Homo Sapiens
aatggtgagcactctggact

SEQ ID NO: 43795 - DNA, 20 bp, Homo Sapiens
aatggtgagcactttggact

SEQ ID NO: 43796 - DNA, 19 bp, Homo Sapiens
aatggtggagttaaagact

SEQ ID NO: 43797 - DNA, 29 bp, Homo Sapiens
aatggtggagttaaagactttttctctga

SEQ ID NO: 43798 - DNA, 30 bp, Homo Sapiens; identical to SEQ ID NO: 2232

SEQ ID NO: 43799 - DNA, 31 bp, Homo Sapiens; identical to SEQ ID NO: 2233

SEQ ID NO: 43800 - DNA, 32 bp, Homo Sapiens; identical to SEQ ID NO: 2234

SEQ ID NO: 43801 - DNA, 29 bp, Homo Sapiens
aatggtggttcagtggtagaattctcgcc

SEQ ID NO: 43802 - DNA, 30 bp, Homo Sapiens; identical to SEQ ID NO: 2236

SEQ ID NO: 43803 - DNA, 16 bp, Homo Sapiens
aatggttagcactctg

SEQ ID NO: 43804 - DNA, 17 bp, Homo Sapiens
aatggttagcactctgg

SEQ ID NO: 43805 - DNA, 18 bp, Homo Sapiens
aatggttagcactctgga

SEQ ID NO: 43806 - DNA, 20 bp, Homo Sapiens
aatggttagcactctggact

SEQ ID NO: 43807 - DNA, 21 bp, Homo Sapiens
aatggttagcactctggactc

SEQ ID NO: 43808 - DNA, 24 bp, Homo Sapiens
aatggttagcactctggactctga

SEQ ID NO: 43809 - DNA, 25 bp, Homo Sapiens
aatggttagcactctggactctgaa

SEQ ID NO: 43810 - DNA, 26 bp, Homo Sapiens
aatggttagcactctggactctgaat

SEQ ID NO: 43811 - DNA, 27 bp, Homo Sapiens
aatggttagcactctggactctgaatc

SEQ ID NO: 43812 - DNA, 28 bp, Homo Sapiens
aatggttagcactctggactctgaatcc

SEQ ID NO: 43813 - DNA, 29 bp, Homo Sapiens
aatggttagcactctggactctgaatcca

SEQ ID NO: 43814 - DNA, 31 bp, Homo Sapiens; identical to SEQ ID NO: 2251

SEQ ID NO: 43815 - DNA, 32 bp, Homo Sapiens; identical to SEQ ID NO: 2252

SEQ ID NO: 43816 - DNA, 39 bp, Homo Sapiens; identical to SEQ ID NO: 2253

SEQ ID NO: 43817 - DNA, 40 bp, Homo Sapiens; identical to SEQ ID NO: 2254

SEQ ID NO: 43818 - DNA, 43 bp, Homo Sapiens; identical to SEQ ID NO: 2255

SEQ ID NO: 43819 - DNA, 27 bp, Homo Sapiens
aatggttagcactctggactttgaatc

SEQ ID NO: 43820 - DNA, 26 bp, Homo Sapiens
aatgttggttatacccttcccgtact

SEQ ID NO: 43821 - DNA, 29 bp, Homo Sapiens
aatgttggttatacccttcccgtactacc

SEQ ID NO: 43822 - DNA, 30 bp, Homo Sapiens; identical to SEQ ID NO: 2272

SEQ ID NO: 43823 - DNA, 16 bp, Homo Sapiens
aatgtttagacgggct

SEQ ID NO: 43824 - DNA, 17 bp, Homo Sapiens
aatgtttagacgggctc

SEQ ID NO: 43825 - DNA, 18 bp, Homo Sapiens
aatgtttagacgggctca

SEQ ID NO: 43826 - DNA, 19 bp, Homo Sapiens
aatgtttagacgggctcac

SEQ ID NO: 43827 - DNA, 20 bp, Homo Sapiens
aatgtttagacgggctcaca

SEQ ID NO: 43828 - DNA, 25 bp, Homo Sapiens
aatgtttagacgggctcacatcacc

SEQ ID NO: 43829 - DNA, 26 bp, Homo Sapiens
aatgtttagacgggctcacatcaccc

SEQ ID NO: 43830 - DNA, 27 bp, Homo Sapiens
aatgtttagacgggctcacatcacccc

SEQ ID NO: 43831 - DNA, 30 bp, Homo Sapiens; identical to SEQ ID NO: 2287

SEQ ID NO: 43832 - DNA, 32 bp, Homo Sapiens; identical to SEQ ID NO: 2289

SEQ ID NO: 43833 - DNA, 36 bp, Homo Sapiens; identical to SEQ ID NO: 2292

SEQ ID NO: 43834 - DNA, 37 bp, Homo Sapiens; identical to SEQ ID NO: 2293

SEQ ID NO: 43835 - DNA, 17 bp, Homo Sapiens
aattaactagttttgac

SEQ ID NO: 43836 - DNA, 44 bp, Homo Sapiens; identical to SEQ ID NO: 2327

SEQ ID NO: 43837 - DNA, 39 bp, Homo Sapiens; identical to SEQ ID NO: 2341

SEQ ID NO: 43838 - DNA, 39 bp, Homo Sapiens; identical to SEQ ID NO: 2343

SEQ ID NO: 43839 - DNA, 39 bp, Homo Sapiens; identical to SEQ ID NO: 2345

SEQ ID NO: 43840 - DNA, 18 bp, Homo Sapiens
aattccccgacggggagc

SEQ ID NO: 43841 - DNA, 34 bp, Homo Sapiens; identical to SEQ ID NO: 2354

SEQ ID NO: 43842 - DNA, 35 bp, Homo Sapiens; identical to SEQ ID NO: 2355

SEQ ID NO: 43843 - DNA, 36 bp, Homo Sapiens; identical to SEQ ID NO: 2356

SEQ ID NO: 43844 - DNA, 16 bp, Homo Sapiens
aattctcgcctgccac

SEQ ID NO: 43845 - DNA, 17 bp, Homo Sapiens
aattctcgcctgccacg

SEQ ID NO: 43846 - DNA, 18 bp, Homo Sapiens
aattctcgcctgccacgc

SEQ ID NO: 43847 - DNA, 20 bp, Homo Sapiens
aattctcgcctgccacgcgg

SEQ ID NO: 43848 - DNA, 22 bp, Homo Sapiens
aattctcgcctgccacgcggga

SEQ ID NO: 43849 - DNA, 27 bp, Homo Sapiens
aattctcgcctgccacgcgggaggccc

SEQ ID NO: 43850 - DNA, 31 bp, Homo Sapiens
aattctcgcctgccacgcgggaggcccgggt

SEQ ID NO: 43851 - DNA, 41 bp, Homo Sapiens; identical to SEQ ID NO: 2376

SEQ ID NO: 43852 - DNA, 42 bp, Homo Sapiens; identical to SEQ ID NO: 2377

SEQ ID NO: 43853 - DNA, 16 bp, Homo Sapiens
aattttggtgcaactc

SEQ ID NO: 43854 - DNA, 31 bp, Homo Sapiens; identical to SEQ ID NO: 2393

SEQ ID NO: 43855 - DNA, 23 bp, Homo Sapiens
acaaaacgaatgatttcgactca

SEQ ID NO: 43856 - DNA, 33 bp, Homo Sapiens; identical to SEQ ID NO: 2415

SEQ ID NO: 43857 - DNA, 34 bp, Homo Sapiens; identical to SEQ ID NO: 2416

SEQ ID NO: 43858 - DNA, 35 bp, Homo Sapiens; identical to SEQ ID NO: 2417

SEQ ID NO: 43859 - DNA, 32 bp, Homo Sapiens; identical to SEQ ID NO: 2433

SEQ ID NO: 43860 - DNA, 19 bp, Homo Sapiens
acaacatggctttctcacc

SEQ ID NO: 43861 - DNA, 30 bp, Homo Sapiens; identical to SEQ ID NO: 2449

SEQ ID NO: 43862 - DNA, 25 bp, Homo Sapiens
acaagaactgctaactcatgccccc

SEQ ID NO: 43863 - DNA, 28 bp, Homo Sapiens
acaagaactgctaactcatgcccccatg

SEQ ID NO: 43864 - DNA, 31 bp, Homo Sapiens; identical to SEQ ID NO: 2474

SEQ ID NO: 43865 - DNA, 35 bp, Homo Sapiens; identical to SEQ ID NO: 2478

SEQ ID NO: 43866 - DNA, 38 bp, Homo Sapiens; identical to SEQ ID NO: 2481

SEQ ID NO: 43867 - DNA, 40 bp, Homo Sapiens; identical to SEQ ID NO: 2483

SEQ ID NO: 43868 - DNA, 41 bp, Homo Sapiens; identical to SEQ ID NO: 2484

SEQ ID NO: 43869 - DNA, 42 bp, Homo Sapiens; identical to SEQ ID NO: 2485

SEQ ID NO: 43870 - DNA, 43 bp, Homo Sapiens; identical to SEQ ID NO: 2486

SEQ ID NO: 43871 - DNA, 44 bp, Homo Sapiens; identical to SEQ ID NO: 2487

SEQ ID NO: 43872 - DNA, 47 bp, Homo Sapiens; identical to SEQ ID NO: 2490

SEQ ID NO: 43873 - DNA, 18 bp, Homo Sapiens
acacctctttacagtgac

SEQ ID NO: 43874 - DNA, 20 bp, Homo Sapiens
acacctctttacagtgacca

SEQ ID NO: 43875 - DNA, 17 bp, Homo Sapiens
acacgcagaaggtcctg

SEQ ID NO: 43876 - DNA, 38 bp, Homo Sapiens
acacgcagaaggtcctgggttcgagccccagtggaacc

SEQ ID NO: 43877 - DNA, 40 bp, Homo Sapiens; identical to SEQ ID NO: 2507

SEQ ID NO: 43878 - DNA, 41 bp, Homo Sapiens; identical to SEQ ID NO: 2508

SEQ ID NO: 43879 - DNA, 42 bp, Homo Sapiens; identical to SEQ ID NO: 2509

SEQ ID NO: 43880 - DNA, 38 bp, Homo Sapiens
acacgcgaaaggtccccggttcgaaaccgggcggaaac

SEQ ID NO: 43881 - DNA, 39 bp, Homo Sapiens; identical to SEQ ID NO: 31897

SEQ ID NO: 43882 - DNA, 41 bp, Homo Sapiens; identical to SEQ ID NO: 2514

SEQ ID NO: 43883 - DNA, 31 bp, Homo Sapiens; identical to SEQ ID NO: 2517

SEQ ID NO: 43884 - DNA, 24 bp, Homo Sapiens
acactgaaaatgtttagacgggct

SEQ ID NO: 43885 - DNA, 28 bp, Homo Sapiens
acactgaaaatgtttagacgggctcaca

SEQ ID NO: 43886 - DNA, 33 bp, Homo Sapiens; identical to SEQ ID NO: 2551

SEQ ID NO: 43887 - DNA, 36 bp, Homo Sapiens; identical to SEQ ID NO: 2554

SEQ ID NO: 43888 - DNA, 37 bp, Homo Sapiens; identical to SEQ ID NO: 2555

SEQ ID NO: 43889 - DNA, 38 bp, Homo Sapiens; identical to SEQ ID NO: 2556

SEQ ID NO: 43890 - DNA, 39 bp, Homo Sapiens; identical to SEQ ID NO: 2557

SEQ ID NO: 43891 - DNA, 40 bp, Homo Sapiens; identical to SEQ ID NO: 2558

SEQ ID NO: 43892 - DNA, 17 bp, Homo Sapiens
acagaggcttacgaccc

SEQ ID NO: 43893 - DNA, 29 bp, Homo Sapiens
acagaggcttacgaccccttatttacccc

SEQ ID NO: 43894 - DNA, 18 bp, Homo Sapiens
acagctatccattggtct

SEQ ID NO: 43895 - DNA, 33 bp, Homo Sapiens; identical to SEQ ID NO: 2615

SEQ ID NO: 43896 - DNA, 34 bp, Homo Sapiens; identical to SEQ ID NO: 2616

SEQ ID NO: 43897 - DNA, 35 bp, Homo Sapiens; identical to SEQ ID NO: 2617

SEQ ID NO: 43898 - DNA, 36 bp, Homo Sapiens; identical to SEQ ID NO: 2618

SEQ ID NO: 43899 - DNA, 37 bp, Homo Sapiens; identical to SEQ ID NO: 2619

SEQ ID NO: 43900 - DNA, 38 bp, Homo Sapiens; identical to SEQ ID NO: 2620

SEQ ID NO: 43901 - DNA, 32 bp, Homo Sapiens; identical to SEQ ID NO: 2622

SEQ ID NO: 43902 - DNA, 33 bp, Homo Sapiens; identical to SEQ ID NO: 2623

SEQ ID NO: 43903 - DNA, 34 bp, Homo Sapiens; identical to SEQ ID NO: 2624

SEQ ID NO: 43904 - DNA, 35 bp, Homo Sapiens; identical to SEQ ID NO: 2625

SEQ ID NO: 43905 - DNA, 36 bp, Homo Sapiens; identical to SEQ ID NO: 2626

SEQ ID NO: 43906 - DNA, 37 bp, Homo Sapiens; identical to SEQ ID NO: 2627

SEQ ID NO: 43907 - DNA, 25 bp, Homo Sapiens
acaggttcgaatcctgttcgtgacg

SEQ ID NO: 43908 - DNA, 27 bp, Homo Sapiens
acaggttcgaatcctgttcgtgacgcc

SEQ ID NO: 43909 - DNA, 16 bp, Homo Sapiens
acatcagattgtgaat

SEQ ID NO: 43910 - DNA, 17 bp, Homo Sapiens
acatcagattgtgaatc

SEQ ID NO: 43911 - DNA, 30 bp, Homo Sapiens; identical to SEQ ID NO: 2675

SEQ ID NO: 43912 - DNA, 38 bp, Homo Sapiens; identical to SEQ ID NO: 2683

SEQ ID NO: 43913 - DNA, 16 bp, Homo Sapiens
acatggctttctcacc

SEQ ID NO: 43914 - DNA, 17 bp, Homo Sapiens
acatggctttctcacca

SEQ ID NO: 43915 - DNA, 22 bp, Homo Sapiens
acatggtctagcggttaggatt

SEQ ID NO: 43916 - DNA, 24 bp, Homo Sapiens
acatggtctagcggttaggattcc

SEQ ID NO: 43917 - DNA, 25 bp, Homo Sapiens
acatggtctagcggttaggattcct

SEQ ID NO: 43918 - DNA, 26 bp, Homo Sapiens
acatggtctagcggttaggattcctg

SEQ ID NO: 43919 - DNA, 28 bp, Homo Sapiens
acatggtctagcggttaggattcctggt

SEQ ID NO: 43920 - DNA, 29 bp, Homo Sapiens
acatggtctagcggttaggattcctggtt

SEQ ID NO: 43921 - DNA, 30 bp, Homo Sapiens; identical to SEQ ID NO: 2704

SEQ ID NO: 43922 - DNA, 31 bp, Homo Sapiens; identical to SEQ ID NO: 2705

SEQ ID NO: 43923 - DNA, 32 bp, Homo Sapiens; identical to SEQ ID NO: 2706

SEQ ID NO: 43924 - DNA, 22 bp, Homo Sapiens
accaaaacatcagattgtgaat

SEQ ID NO: 43925 - DNA, 23 bp, Homo Sapiens
accaaaacatcagattgtgaatc

SEQ ID NO: 43926 - DNA, 35 bp, Homo Sapiens; identical to SEQ ID NO: 2728

SEQ ID NO: 43927 - DNA, 36 bp, Homo Sapiens; identical to SEQ ID NO: 2729

SEQ ID NO: 43928 - DNA, 44 bp, Homo Sapiens; identical to SEQ ID NO: 2736

SEQ ID NO: 43929 - DNA, 46 bp, Homo Sapiens; identical to SEQ ID NO: 2738

SEQ ID NO: 43930 - DNA, 22 bp, Homo Sapiens
accaacacctctttacagtgac

SEQ ID NO: 43931 - DNA, 18 bp, Homo Sapiens
accagaatggccgagtgg

SEQ ID NO: 43932 - DNA, 25 bp, Homo Sapiens
accagaatggccgagtggttaaggc

SEQ ID NO: 43933 - DNA, 16 bp, Homo Sapiens
accaggatggccgagt

SEQ ID NO: 43934 - DNA, 17 bp, Homo Sapiens
accaggatggccgagtg

SEQ ID NO: 43935 - DNA, 18 bp, Homo Sapiens
accaggatggccgagtgg

SEQ ID NO: 43936 - DNA, 19 bp, Homo Sapiens
accaggatggccgagtggt

SEQ ID NO: 43937 - DNA, 22 bp, Homo Sapiens
accaggatggccgagtggttaa

SEQ ID NO: 43938 - DNA, 23 bp, Homo Sapiens
accaggatggccgagtggttaag

SEQ ID NO: 43939 - DNA, 24 bp, Homo Sapiens
accaggatggccgagtggttaagg

SEQ ID NO: 43940 - DNA, 25 bp, Homo Sapiens
accaggatggccgagtggttaaggc

SEQ ID NO: 43941 - DNA, 33 bp, Homo Sapiens; identical to SEQ ID NO: 2782

SEQ ID NO: 43942 - DNA, 17 bp, Homo Sapiens
accaggcggaaacacca

SEQ ID NO: 43943 - DNA, 35 bp, Homo Sapiens; identical to SEQ ID NO: 2793

SEQ ID NO: 43944 - DNA, 36 bp, Homo Sapiens; identical to SEQ ID NO: 2794

SEQ ID NO: 43945 - DNA, 37 bp, Homo Sapiens; identical to SEQ ID NO: 2795

SEQ ID NO: 43946 - DNA, 37 bp, Homo Sapiens; identical to SEQ ID NO: 2798

SEQ ID NO: 43947 - DNA, 16 bp, Homo Sapiens
accatcctctgctacc

SEQ ID NO: 43948 - DNA, 17 bp, Homo Sapiens
accatcctctgctacca

SEQ ID NO: 43949 - DNA, 43 bp, Homo Sapiens; identical to SEQ ID NO: 2831

SEQ ID NO: 43950 - DNA, 45 bp, Homo Sapiens; identical to SEQ ID NO: 2833

SEQ ID NO: 43951 - DNA, 46 bp, Homo Sapiens; identical to SEQ ID NO: 2834

SEQ ID NO: 43952 - DNA, 47 bp, Homo Sapiens; identical to SEQ ID NO: 2835

SEQ ID NO: 43953 - DNA, 18 bp, Homo Sapiens
acccagaggtcgatggat

SEQ ID NO: 43954 - DNA, 19 bp, Homo Sapiens
acccagaggtcgatggatc

SEQ ID NO: 43955 - DNA, 20 bp, Homo Sapiens
acccagaggtcgatggatcg

SEQ ID NO: 43956 - DNA, 21 bp, Homo Sapiens
acccagaggtcgatggatcga

SEQ ID NO: 43957 - DNA, 38 bp, Homo Sapiens; identical to SEQ ID NO: 31995

SEQ ID NO: 43958 - DNA, 30 bp, Homo Sapiens; identical to SEQ ID NO: 2849

SEQ ID NO: 43959 - DNA, 32 bp, Homo Sapiens; identical to SEQ ID NO: 2851

SEQ ID NO: 43960 - DNA, 33 bp, Homo Sapiens; identical to SEQ ID NO: 2852

SEQ ID NO: 43961 - DNA, 34 bp, Homo Sapiens; identical to SEQ ID NO: 2853

SEQ ID NO: 43962 - DNA, 35 bp, Homo Sapiens; identical to SEQ ID NO: 2854

SEQ ID NO: 43963 - DNA, 36 bp, Homo Sapiens; identical to SEQ ID NO: 2855

SEQ ID NO: 43964 - DNA, 37 bp, Homo Sapiens; identical to SEQ ID NO: 2856

SEQ ID NO: 43965 - DNA, 38 bp, Homo Sapiens; identical to SEQ ID NO: 2857

SEQ ID NO: 43966 - DNA, 39 bp, Homo Sapiens; identical to SEQ ID NO: 2858

SEQ ID NO: 43967 - DNA, 16 bp, Homo Sapiens
accccactcctggtac

SEQ ID NO: 43968 - DNA, 17 bp, Homo Sapiens
accccactcctggtacc

SEQ ID NO: 43969 - DNA, 18 bp, Homo Sapiens
accccactcctggtacca

SEQ ID NO: 43970 - DNA, 18 bp, Homo Sapiens
accccacttctggtacca

SEQ ID NO: 43971 - DNA, 17 bp, Homo Sapiens
accccgtacgggccacc

SEQ ID NO: 43972 - DNA, 16 bp, Homo Sapiens
accccgtccgtgcctc

SEQ ID NO: 43973 - DNA, 17 bp, Homo Sapiens
accccgtccgtgcctcc

SEQ ID NO: 43974 - DNA, 18 bp, Homo Sapiens
accccgtccgtgcctcca

SEQ ID NO: 43975 - DNA, 28 bp, Homo Sapiens
acccgggttcgattcccgggcggcgcac

SEQ ID NO: 43976 - DNA, 16 bp, Homo Sapiens
accctgctcgctgcgc

SEQ ID NO: 43977 - DNA, 17 bp, Homo Sapiens
accctgctcgctgcgcc

SEQ ID NO: 43978 - DNA, 18 bp, Homo Sapiens
accctgctcgctgcgcca

SEQ ID NO: 43979 - DNA, 38 bp, Homo Sapiens; identical to SEQ ID NO: 2912

SEQ ID NO: 43980 - DNA, 34 bp, Homo Sapiens; identical to SEQ ID NO: 2916

SEQ ID NO: 43981 - DNA, 35 bp, Homo Sapiens; identical to SEQ ID NO: 2917

SEQ ID NO: 43982 - DNA, 36 bp, Homo Sapiens; identical to SEQ ID NO: 2918

SEQ ID NO: 43983 - DNA, 37 bp, Homo Sapiens; identical to SEQ ID NO: 2919

SEQ ID NO: 43984 - DNA, 16 bp, Homo Sapiens
accgaagatcgcgggt

SEQ ID NO: 43985 - DNA, 34 bp, Homo Sapiens; identical to SEQ ID NO: 2926

SEQ ID NO: 43986 - DNA, 35 bp, Homo Sapiens; identical to SEQ ID NO: 2927

SEQ ID NO: 43987 - DNA, 36 bp, Homo Sapiens; identical to SEQ ID NO: 2928

SEQ ID NO: 43988 - DNA, 37 bp, Homo Sapiens; identical to SEQ ID NO: 2929

SEQ ID NO: 43989 - DNA, 38 bp, Homo Sapiens; identical to SEQ ID NO: 2930

SEQ ID NO: 43990 - DNA, 16 bp, Homo Sapiens
accgccgcggcccggg

SEQ ID NO: 43991 - DNA, 18 bp, Homo Sapiens
accgccgcggcccgggtt

SEQ ID NO: 43992 - DNA, 33 bp, Homo Sapiens; identical to SEQ ID NO: 2952

SEQ ID NO: 43993 - DNA, 34 bp, Homo Sapiens; identical to SEQ ID NO: 2955

SEQ ID NO: 43994 - DNA, 35 bp, Homo Sapiens; identical to SEQ ID NO: 2956

SEQ ID NO: 43995 - DNA, 36 bp, Homo Sapiens; identical to SEQ ID NO: 2957

SEQ ID NO: 43996 - DNA, 37 bp, Homo Sapiens; identical to SEQ ID NO: 2958

SEQ ID NO: 43997 - DNA, 38 bp, Homo Sapiens; identical to SEQ ID NO: 2959

SEQ ID NO: 43998 - DNA, 39 bp, Homo Sapiens; identical to SEQ ID NO: 2960

SEQ ID NO: 43999 - DNA, 30 bp, Homo Sapiens; identical to SEQ ID NO: 2977

SEQ ID NO: 44000 - DNA, 32 bp, Homo Sapiens; identical to SEQ ID NO: 2979

SEQ ID NO: 44001 - DNA, 33 bp, Homo Sapiens; identical to SEQ ID NO: 2980

SEQ ID NO: 44002 - DNA, 16 bp, Homo Sapiens
accgggcagaagcacc

SEQ ID NO: 44003 - DNA, 17 bp, Homo Sapiens
accgggcagaagcacca

SEQ ID NO: 44004 - DNA, 16 bp, Homo Sapiens
accgggcggaaacacc

SEQ ID NO: 44005 - DNA, 17 bp, Homo Sapiens
accgggcggaaacacca

SEQ ID NO: 44006 - DNA, 28 bp, Homo Sapiens
accggggttcaattccccgacggggagc

SEQ ID NO: 44007 - DNA, 29 bp, Homo Sapiens
accggggttcaattccccgacggggagcc

SEQ ID NO: 44008 - DNA, 25 bp, Homo Sapiens
accggggttcgattccccgacgggg

SEQ ID NO: 44009 - DNA, 27 bp, Homo Sapiens
accggggttcgattccccgacggggag

SEQ ID NO: 44010 - DNA, 28 bp, Homo Sapiens
accggggttcgattccccgacggggagc

SEQ ID NO: 44011 - DNA, 29 bp, Homo Sapiens
accggggttcgattccccgacggggagcc

SEQ ID NO: 44012 - DNA, 30 bp, Homo Sapiens; identical to SEQ ID NO: 2992

SEQ ID NO: 44013 - DNA, 17 bp, Homo Sapiens
acctcagagggggcacc

SEQ ID NO: 44014 - DNA, 18 bp, Homo Sapiens
acctcagagggggcacca

SEQ ID NO: 44015 - DNA, 16 bp, Homo Sapiens
acctctttacagtgac

SEQ ID NO: 44016 - DNA, 17 bp, Homo Sapiens
acctctttacagtgacc

SEQ ID NO: 44017 - DNA, 18 bp, Homo Sapiens
acctctttacagtgacca

SEQ ID NO: 44018 - DNA, 16 bp, Homo Sapiens
acctgccggggcttcc

SEQ ID NO: 44019 - DNA, 17 bp, Homo Sapiens
acctgccggggcttcca

SEQ ID NO: 44020 - DNA, 35 bp, Homo Sapiens; identical to SEQ ID NO: 3028

SEQ ID NO: 44021 - DNA, 17 bp, Homo Sapiens
acctttttccaaggaca

SEQ ID NO: 44022 - DNA, 16 bp, Homo Sapiens
acgaatgatttcgact

SEQ ID NO: 44023 - DNA, 17 bp, Homo Sapiens
acgaatgatttcgactc

SEQ ID NO: 44024 - DNA, 18 bp, Homo Sapiens
acgaatgatttcgactca

SEQ ID NO: 44025 - DNA, 35 bp, Homo Sapiens; identical to SEQ ID NO: 3066

SEQ ID NO: 44026 - DNA, 36 bp, Homo Sapiens; identical to SEQ ID NO: 3067

SEQ ID NO: 44027 - DNA, 32 bp, Homo Sapiens; identical to SEQ ID NO: 3076

SEQ ID NO: 44028 - DNA, 37 bp, Homo Sapiens; identical to SEQ ID NO: 3081

SEQ ID NO: 44029 - DNA, 38 bp, Homo Sapiens; identical to SEQ ID NO: 3082

SEQ ID NO: 44030 - DNA, 40 bp, Homo Sapiens; identical to SEQ ID NO: 3084

SEQ ID NO: 44031 - DNA, 43 bp, Homo Sapiens; identical to SEQ ID NO: 3087

SEQ ID NO: 44032 - DNA, 46 bp, Homo Sapiens; identical to SEQ ID NO: 3089

SEQ ID NO: 44033 - DNA, 47 bp, Homo Sapiens; identical to SEQ ID NO: 3090

SEQ ID NO: 44034 - DNA, 35 bp, Homo Sapiens; identical to SEQ ID NO: 3096

SEQ ID NO: 44035 - DNA, 36 bp, Homo Sapiens; identical to SEQ ID NO: 3097

SEQ ID NO: 44036 - DNA, 37 bp, Homo Sapiens; identical to SEQ ID NO: 3098

SEQ ID NO: 44037 - DNA, 38 bp, Homo Sapiens; identical to SEQ ID NO: 3099

SEQ ID NO: 44038 - DNA, 39 bp, Homo Sapiens; identical to SEQ ID NO: 3100

SEQ ID NO: 44039 - DNA, 40 bp, Homo Sapiens; identical to SEQ ID NO: 3101

SEQ ID NO: 44040 - DNA, 17 bp, Homo Sapiens
acgccaaggtcgcgggt

SEQ ID NO: 44041 - DNA, 33 bp, Homo Sapiens; identical to SEQ ID NO: 3112

SEQ ID NO: 44042 - DNA, 38 bp, Homo Sapiens; identical to SEQ ID NO: 3115

SEQ ID NO: 44043 - DNA, 39 bp, Homo Sapiens; identical to SEQ ID NO: 3116

SEQ ID NO: 44044 - DNA, 17 bp, Homo Sapiens
acgcgaaaggtccccgg

SEQ ID NO: 44045 - DNA, 18 bp, Homo Sapiens
acgcgaaaggtccccggt

SEQ ID NO: 44046 - DNA, 33 bp, Homo Sapiens
acgcgaaaggtccccggttcgaaaccgggcgga

SEQ ID NO: 44047 - DNA, 36 bp, Homo Sapiens; identical to SEQ ID NO: 3127

SEQ ID NO: 44048 - DNA, 37 bp, Homo Sapiens; identical to SEQ ID NO: 3128

SEQ ID NO: 44049 - DNA, 39 bp, Homo Sapiens; identical to SEQ ID NO: 3130

SEQ ID NO: 44050 - DNA, 38 bp, Homo Sapiens; identical to SEQ ID NO: 3137

SEQ ID NO: 44051 - DNA, 17 bp, Homo Sapiens
acgcgggagaccggggt

SEQ ID NO: 44052 - DNA, 33 bp, Homo Sapiens; identical to SEQ ID NO: 3142

SEQ ID NO: 44053 - DNA, 34 bp, Homo Sapiens; identical to SEQ ID NO: 3143

SEQ ID NO: 44054 - DNA, 35 bp, Homo Sapiens; identical to SEQ ID NO: 3144

SEQ ID NO: 44055 - DNA, 37 bp, Homo Sapiens; identical to SEQ ID NO: 3146

SEQ ID NO: 44056 - DNA, 38 bp, Homo Sapiens; identical to SEQ ID NO: 3147

SEQ ID NO: 44057 - DNA, 39 bp, Homo Sapiens; identical to SEQ ID NO: 3148

SEQ ID NO: 44058 - DNA, 29 bp, Homo Sapiens
acgcgggagaccggggttcgattccccga

SEQ ID NO: 44059 - DNA, 30 bp, Homo Sapiens; identical to SEQ ID NO: 3155

SEQ ID NO: 44060 - DNA, 31 bp, Homo Sapiens; identical to SEQ ID NO: 3156

SEQ ID NO: 44061 - DNA, 32 bp, Homo Sapiens; identical to SEQ ID NO: 3157

SEQ ID NO: 44062 - DNA, 33 bp, Homo Sapiens; identical to SEQ ID NO: 3158

SEQ ID NO: 44063 - DNA, 34 bp, Homo Sapiens; identical to SEQ ID NO: 3159

SEQ ID NO: 44064 - DNA, 35 bp, Homo Sapiens; identical to SEQ ID NO: 3160

SEQ ID NO: 44065 - DNA, 36 bp, Homo Sapiens; identical to SEQ ID NO: 3161

SEQ ID NO: 44066 - DNA, 37 bp, Homo Sapiens; identical to SEQ ID NO: 3162

SEQ ID NO: 44067 - DNA, 38 bp, Homo Sapiens; identical to SEQ ID NO: 3163

SEQ ID NO: 44068 - DNA, 39 bp, Homo Sapiens; identical to SEQ ID NO: 3164

SEQ ID NO: 44069 - DNA, 16 bp, Homo Sapiens
acgcgggaggcccggg

SEQ ID NO: 44070 - DNA, 17 bp, Homo Sapiens
acgcgggaggcccgggt

SEQ ID NO: 44071 - DNA, 30 bp, Homo Sapiens; identical to SEQ ID NO: 3169

SEQ ID NO: 44072 - DNA, 32 bp, Homo Sapiens; identical to SEQ ID NO: 3170

SEQ ID NO: 44073 - DNA, 34 bp, Homo Sapiens; identical to SEQ ID NO: 3172

SEQ ID NO: 44074 - DNA, 35 bp, Homo Sapiens; identical to SEQ ID NO: 3173

SEQ ID NO: 44075 - DNA, 36 bp, Homo Sapiens; identical to SEQ ID NO: 3174

SEQ ID NO: 44076 - DNA, 37 bp, Homo Sapiens; identical to SEQ ID NO: 3175

SEQ ID NO: 44077 - DNA, 38 bp, Homo Sapiens; identical to SEQ ID NO: 3176

SEQ ID NO: 44078 - DNA, 39 bp, Homo Sapiens; identical to SEQ ID NO: 3177

SEQ ID NO: 44079 - DNA, 34 bp, Homo Sapiens; identical to SEQ ID NO: 3179

SEQ ID NO: 44080 - DNA, 38 bp, Homo Sapiens; identical to SEQ ID NO: 3181

SEQ ID NO: 44081 - DNA, 24 bp, Homo Sapiens
acgcgtgggttcgaatcccatcct

SEQ ID NO: 44082 - DNA, 26 bp, Homo Sapiens
acgcgtgggttcgaatcccatcctcg

SEQ ID NO: 44083 - DNA, 30 bp, Homo Sapiens; identical to SEQ ID NO: 3185

SEQ ID NO: 44084 - DNA, 31 bp, Homo Sapiens; identical to SEQ ID NO: 3186

SEQ ID NO: 44085 - DNA, 32 bp, Homo Sapiens; identical to SEQ ID NO: 3187

SEQ ID NO: 44086 - DNA, 16 bp, Homo Sapiens
acgggctcacatcacc

SEQ ID NO: 44087 - DNA, 28 bp, Homo Sapiens
acgggctcacatcaccccataaacacca

SEQ ID NO: 44088 - DNA, 18 bp, Homo Sapiens
acggtagcgcgtctgact

SEQ ID NO: 44089 - DNA, 20 bp, Homo Sapiens
acggtagcgcgtctgactcc

SEQ ID NO: 44090 - DNA, 39 bp, Homo Sapiens; identical to SEQ ID NO: 3206

SEQ ID NO: 44091 - DNA, 40 bp, Homo Sapiens
acgtatgaggccccgggttcaatccccggcatctccacca

SEQ ID NO: 44092 - DNA, 29 bp, Homo Sapiens
acgtgggttcgaatcccatcctcgtcgcc

SEQ ID NO: 44093 - DNA, 30 bp, Homo Sapiens
acgtgggttcgaatcccatcctcgtcgcca

SEQ ID NO: 44094 - DNA, 17 bp, Homo Sapiens
acgttcgcctcacacgc

SEQ ID NO: 44095 - DNA, 23 bp, Homo Sapiens
actaagtgtttgtgggtttaagt

SEQ ID NO: 44096 - DNA, 36 bp, Homo Sapiens; identical to SEQ ID NO: 3224

SEQ ID NO: 44097 - DNA, 16 bp, Homo Sapiens
actcaagttctggtct

SEQ ID NO: 44098 - DNA, 17 bp, Homo Sapiens
actcaagttctggtctc

SEQ ID NO: 44099 - DNA, 18 bp, Homo Sapiens
actcaagttctggtctcc

SEQ ID NO: 44100 - DNA, 30 bp, Homo Sapiens; identical to SEQ ID NO: 3258

SEQ ID NO: 44101 - DNA, 39 bp, Homo Sapiens; identical to SEQ ID NO: 3267

SEQ ID NO: 44102 - DNA, 20 bp, Homo Sapiens
actccagatcagaaggctgc

SEQ ID NO: 44103 - DNA, 17 bp, Homo Sapiens
actcccggtatgggaac

SEQ ID NO: 44104 - DNA, 16 bp, Homo Sapiens
actcccggtgtgggaa

SEQ ID NO: 44105 - DNA, 17 bp, Homo Sapiens
actcccggtgtgggaac

SEQ ID NO: 44106 - DNA, 18 bp, Homo Sapiens
actcccggtgtgggaacc

SEQ ID NO: 44107 - DNA, 19 bp, Homo Sapiens
actcccggtgtgggaacca

SEQ ID NO: 44108 - DNA, 17 bp, Homo Sapiens
actcctggctggctcgc

SEQ ID NO: 44109 - DNA, 18 bp, Homo Sapiens
actcctggctggctcgcc

SEQ ID NO: 44110 - DNA, 19 bp, Homo Sapiens
actcctggctggctcgcca

SEQ ID NO: 44111 - DNA, 16 bp, Homo Sapiens
actctggactctgaat

SEQ ID NO: 44112 - DNA, 17 bp, Homo Sapiens
actctggactctgaatc

SEQ ID NO: 44113 - DNA, 18 bp, Homo Sapiens
actctggactctgaatcc

SEQ ID NO: 44114 - DNA, 19 bp, Homo Sapiens
actctggactctgaatcca

SEQ ID NO: 44115 - DNA, 20 bp, Homo Sapiens
actctggactctgaatccag

SEQ ID NO: 44116 - DNA, 21 bp, Homo Sapiens
actctggactctgaatccagc

SEQ ID NO: 44117 - DNA, 26 bp, Homo Sapiens
actctggactctgaatccagcgatcc

SEQ ID NO: 44118 - DNA, 28 bp, Homo Sapiens
actctggactctgaatccagcgatccga

SEQ ID NO: 44119 - DNA, 29 bp, Homo Sapiens
actctggactctgaatccagcgatccgag

SEQ ID NO: 44120 - DNA, 30 bp, Homo Sapiens; identical to SEQ ID NO: 3319

SEQ ID NO: 44121 - DNA, 31 bp, Homo Sapiens; identical to SEQ ID NO: 3320

SEQ ID NO: 44122 - DNA, 32 bp, Homo Sapiens; identical to SEQ ID NO: 3321

SEQ ID NO: 44123 - DNA, 33 bp, Homo Sapiens; identical to SEQ ID NO: 3322

SEQ ID NO: 44124 - DNA, 17 bp, Homo Sapiens
actctggactttgaatc

SEQ ID NO: 44125 - DNA, 18 bp, Homo Sapiens
actctggactttgaatcc

SEQ ID NO: 44126 - DNA, 20 bp, Homo Sapiens
actcttaatcccagggtcgt

SEQ ID NO: 44127 - DNA, 30 bp, Homo Sapiens; identical to SEQ ID NO: 3341

SEQ ID NO: 44128 - DNA, 31 bp, Homo Sapiens; identical to SEQ ID NO: 3342

SEQ ID NO: 44129 - DNA, 22 bp, Homo Sapiens
actgaaaatgtttagacgggct

SEQ ID NO: 44130 - DNA, 32 bp, Homo Sapiens; identical to SEQ ID NO: 3384

SEQ ID NO: 44131 - DNA, 37 bp, Homo Sapiens; identical to SEQ ID NO: 3389

SEQ ID NO: 44132 - DNA, 16 bp, Homo Sapiens
actgggcggaaacacc

SEQ ID NO: 44133 - DNA, 26 bp, Homo Sapiens
actggtggttcagtggtagaattctc

SEQ ID NO: 44134 - DNA, 28 bp, Homo Sapiens
actggtggttcagtggtagaattctcgc

SEQ ID NO: 44135 - DNA, 29 bp, Homo Sapiens
actggtggttcagtggtagaattctcgcc

SEQ ID NO: 44136 - DNA, 30 bp, Homo Sapiens; identical to SEQ ID NO: 3403

SEQ ID NO: 44137 - DNA, 16 bp, Homo Sapiens
acttaacttgaccgct

SEQ ID NO: 44138 - DNA, 17 bp, Homo Sapiens
acttaacttgaccgctc

SEQ ID NO: 44139 - DNA, 19 bp, Homo Sapiens
acttaacttgaccgctctg

SEQ ID NO: 44140 - DNA, 20 bp, Homo Sapiens
acttaacttgaccgctctga

SEQ ID NO: 44141 - DNA, 21 bp, Homo Sapiens
acttaacttgaccgctctgac

SEQ ID NO: 44142 - DNA, 22 bp, Homo Sapiens
acttaacttgaccgctctgacc

SEQ ID NO: 44143 - DNA, 23 bp, Homo Sapiens
acttaacttgaccgctctgacca

SEQ ID NO: 44144 - DNA, 37 bp, Homo Sapiens; identical to SEQ ID NO: 3450

SEQ ID NO: 44145 - DNA, 39 bp, Homo Sapiens; identical to SEQ ID NO: 3452

SEQ ID NO: 44146 - DNA, 40 bp, Homo Sapiens; identical to SEQ ID NO: 3453

SEQ ID NO: 44147 - DNA, 41 bp, Homo Sapiens; identical to SEQ ID NO: 3454

SEQ ID NO: 44148 - DNA, 42 bp, Homo Sapiens; identical to SEQ ID NO: 3455

SEQ ID NO: 44149 - DNA, 43 bp, Homo Sapiens; identical to SEQ ID NO: 3456

SEQ ID NO: 44150 - DNA, 44 bp, Homo Sapiens; identical to SEQ ID NO: 3457

SEQ ID NO: 44151 - DNA, 28 bp, Homo Sapiens
acttaggagatttcaacttaacttgacc

SEQ ID NO: 44152 - DNA, 31 bp, Homo Sapiens; identical to SEQ ID NO: 3479

SEQ ID NO: 44153 - DNA, 32 bp, Homo Sapiens; identical to SEQ ID NO: 3480

SEQ ID NO: 44154 - DNA, 34 bp, Homo Sapiens; identical to SEQ ID NO: 3482

SEQ ID NO: 44155 - DNA, 35 bp, Homo Sapiens; identical to SEQ ID NO: 3483

SEQ ID NO: 44156 - DNA, 36 bp, Homo Sapiens; identical to SEQ ID NO: 3484

SEQ ID NO: 44157 - DNA, 37 bp, Homo Sapiens; identical to SEQ ID NO: 3485

SEQ ID NO: 44158 - DNA, 38 bp, Homo Sapiens; identical to SEQ ID NO: 3486

SEQ ID NO: 44159 - DNA, 45 bp, Homo Sapiens; identical to SEQ ID NO: 3509

SEQ ID NO: 44160 - DNA, 16 bp, Homo Sapiens
acttgaccgctctgac

SEQ ID NO: 44161 - DNA, 17 bp, Homo Sapiens
acttgaccgctctgacc

SEQ ID NO: 44162 - DNA, 18 bp, Homo Sapiens
acttgaccgctctgacca

SEQ ID NO: 44163 - DNA, 16 bp, Homo Sapiens
actttacagtcagagg

SEQ ID NO: 44164 - DNA, 21 bp, Homo Sapiens
actttgaatccagcgatccga

SEQ ID NO: 44165 - DNA, 23 bp, Homo Sapiens
actttgaatccagcgatccgagt

SEQ ID NO: 44166 - DNA, 26 bp, Homo Sapiens
actttgatagagtaaataataggagc

SEQ ID NO: 44167 - DNA, 34 bp, Homo Sapiens; identical to SEQ ID NO: 3547

SEQ ID NO: 44168 - DNA, 35 bp, Homo Sapiens; identical to SEQ ID NO: 3548

SEQ ID NO: 44169 - DNA, 36 bp, Homo Sapiens; identical to SEQ ID NO: 3549

SEQ ID NO: 44170 - DNA, 39 bp, Homo Sapiens; identical to SEQ ID NO: 3552

SEQ ID NO: 44171 - DNA, 25 bp, Homo Sapiens
actttgtcaaagttaaattataggc

SEQ ID NO: 44172 - DNA, 26 bp, Homo Sapiens
actttgtcaaagttaaattataggct

SEQ ID NO: 44173 - DNA, 36 bp, Homo Sapiens; identical to SEQ ID NO: 3570

SEQ ID NO: 44174 - DNA, 16 bp, Homo Sapiens
acttttaaaggataac

SEQ ID NO: 44175 - DNA, 31 bp, Homo Sapiens; identical to SEQ ID NO: 3591

SEQ ID NO: 44176 - DNA, 32 bp, Homo Sapiens; identical to SEQ ID NO: 3592

SEQ ID NO: 44177 - DNA, 33 bp, Homo Sapiens; identical to SEQ ID NO: 3593

SEQ ID NO: 44178 - DNA, 16 bp, Homo Sapiens
actttttctctgacca

SEQ ID NO: 44179 - DNA, 32 bp, Homo Sapiens; identical to SEQ ID NO: 3619

SEQ ID NO: 44180 - DNA, 47 bp, Homo Sapiens; identical to SEQ ID NO: 3633

SEQ ID NO: 44181 - DNA, 39 bp, Homo Sapiens; identical to SEQ ID NO: 3658

SEQ ID NO: 44182 - DNA, 17 bp, Homo Sapiens
agaactgctaactcatg

SEQ ID NO: 44183 - DNA, 18 bp, Homo Sapiens
agaactgctaactcatgc

SEQ ID NO: 44184 - DNA, 19 bp, Homo Sapiens
agaactgctaactcatgcc

SEQ ID NO: 44185 - DNA, 22 bp, Homo Sapiens
agaactgctaactcatgccccc

SEQ ID NO: 44186 - DNA, 25 bp, Homo Sapiens
agaactgctaactcatgcccccatg

SEQ ID NO: 44187 - DNA, 26 bp, Homo Sapiens
agaactgctaactcatgcccccatgt

SEQ ID NO: 44188 - DNA, 27 bp, Homo Sapiens
agaactgctaactcatgcccccatgtc

SEQ ID NO: 44189 - DNA, 28 bp, Homo Sapiens
agaactgctaactcatgcccccatgtct

SEQ ID NO: 44190 - DNA, 32 bp, Homo Sapiens; identical to SEQ ID NO: 3704

SEQ ID NO: 44191 - DNA, 35 bp, Homo Sapiens; identical to SEQ ID NO: 3707

SEQ ID NO: 44192 - DNA, 38 bp, Homo Sapiens; identical to SEQ ID NO: 3710

SEQ ID NO: 44193 - DNA, 40 bp, Homo Sapiens; identical to SEQ ID NO: 3712

SEQ ID NO: 44194 - DNA, 41 bp, Homo Sapiens; identical to SEQ ID NO: 3713

SEQ ID NO: 44195 - DNA, 42 bp, Homo Sapiens; identical to SEQ ID NO: 3714

SEQ ID NO: 44196 - DNA, 43 bp, Homo Sapiens; identical to SEQ ID NO: 3715

SEQ ID NO: 44197 - DNA, 44 bp, Homo Sapiens; identical to SEQ ID NO: 3716

SEQ ID NO: 44198 - DNA, 45 bp, Homo Sapiens; identical to SEQ ID NO: 3717

SEQ ID NO: 44199 - DNA, 46 bp, Homo Sapiens; identical to SEQ ID NO: 3718

SEQ ID NO: 44200 - DNA, 17 bp, Homo Sapiens
agaagattccaggttcg

SEQ ID NO: 44201 - DNA, 33 bp, Homo Sapiens; identical to SEQ ID NO: 3729

SEQ ID NO: 44202 - DNA, 35 bp, Homo Sapiens; identical to SEQ ID NO: 3731

SEQ ID NO: 44203 - DNA, 16 bp, Homo Sapiens
agaagattctaggttc

SEQ ID NO: 44204 - DNA, 17 bp, Homo Sapiens
agaagattctaggttcg

SEQ ID NO: 44205 - DNA, 26 bp, Homo Sapiens
agaagattctaggttcgactcctggc

SEQ ID NO: 44206 - DNA, 35 bp, Homo Sapiens; identical to SEQ ID NO: 3741

SEQ ID NO: 44207 - DNA, 16 bp, Homo Sapiens
agaagattgagggttc

SEQ ID NO: 44208 - DNA, 17 bp, Homo Sapiens
agaagattgagggttcg

SEQ ID NO: 44209 - DNA, 35 bp, Homo Sapiens; identical to SEQ ID NO: 3748

SEQ ID NO: 44210 - DNA, 34 bp, Homo Sapiens; identical to SEQ ID NO: 3752

SEQ ID NO: 44211 - DNA, 35 bp, Homo Sapiens; identical to SEQ ID NO: 3753

SEQ ID NO: 44212 - DNA, 36 bp, Homo Sapiens; identical to SEQ ID NO: 3754

SEQ ID NO: 44213 - DNA, 16 bp, Homo Sapiens
agaagattgcaggttc

SEQ ID NO: 44214 - DNA, 32 bp, Homo Sapiens; identical to SEQ ID NO: 3758

SEQ ID NO: 44215 - DNA, 34 bp, Homo Sapiens; identical to SEQ ID NO: 3760

SEQ ID NO: 44216 - DNA, 35 bp, Homo Sapiens; identical to SEQ ID NO: 3761

SEQ ID NO: 44217 - DNA, 36 bp, Homo Sapiens; identical to SEQ ID NO: 3762

SEQ ID NO: 44218 - DNA, 26 bp, Homo Sapiens
agaagcagcttcaaacctgccggggc

SEQ ID NO: 44219 - DNA, 27 bp, Homo Sapiens
agaagcagcttcaaacctgccggggct

SEQ ID NO: 44220 - DNA, 28 bp, Homo Sapiens
agaagcagcttcaaacctgccggggctt

SEQ ID NO: 44221 - DNA, 16 bp, Homo Sapiens
agaaggctgcgtgttc

SEQ ID NO: 44222 - DNA, 30 bp, Homo Sapiens; identical to SEQ ID NO: 3776

SEQ ID NO: 44223 - DNA, 34 bp, Homo Sapiens; identical to SEQ ID NO: 3778

SEQ ID NO: 44224 - DNA, 35 bp, Homo Sapiens; identical to SEQ ID NO: 3779

SEQ ID NO: 44225 - DNA, 36 bp, Homo Sapiens; identical to SEQ ID NO: 3780

SEQ ID NO: 44226 - DNA, 32 bp, Homo Sapiens; identical to SEQ ID NO: 3784

SEQ ID NO: 44227 - DNA, 35 bp, Homo Sapiens; identical to SEQ ID NO: 3787

SEQ ID NO: 44228 - DNA, 36 bp, Homo Sapiens; identical to SEQ ID NO: 3788

SEQ ID NO: 44229 - DNA, 33 bp, Homo Sapiens; identical to SEQ ID NO: 3790

SEQ ID NO: 44230 - DNA, 34 bp, Homo Sapiens; identical to SEQ ID NO: 32295

SEQ ID NO: 44231 - DNA, 35 bp, Homo Sapiens; identical to SEQ ID NO: 3791

SEQ ID NO: 44232 - DNA, 33 bp, Homo Sapiens; identical to SEQ ID NO: 3794

SEQ ID NO: 44233 - DNA, 34 bp, Homo Sapiens; identical to SEQ ID NO: 3795

SEQ ID NO: 44234 - DNA, 35 bp, Homo Sapiens; identical to SEQ ID NO: 3796

SEQ ID NO: 44235 - DNA, 39 bp, Homo Sapiens; identical to SEQ ID NO: 3813

SEQ ID NO: 44236 - DNA, 40 bp, Homo Sapiens; identical to SEQ ID NO: 3814

SEQ ID NO: 44237 - DNA, 18 bp, Homo Sapiens
agaattctcgcctgccac

SEQ ID NO: 44238 - DNA, 19 bp, Homo Sapiens
agaattctcgcctgccacg

SEQ ID NO: 44239 - DNA, 31 bp, Homo Sapiens; identical to SEQ ID NO: 3827

SEQ ID NO: 44240 - DNA, 16 bp, Homo Sapiens
agacaggggttaggcc

SEQ ID NO: 44241 - DNA, 30 bp, Homo Sapiens; identical to SEQ ID NO: 3839

SEQ ID NO: 44242 - DNA, 30 bp, Homo Sapiens; identical to SEQ ID NO: 3851

SEQ ID NO: 44243 - DNA, 31 bp, Homo Sapiens; identical to SEQ ID NO: 3852

SEQ ID NO: 44244 - DNA, 17 bp, Homo Sapiens
agaccggggttcgattc

SEQ ID NO: 44245 - DNA, 18 bp, Homo Sapiens
agaccggggttcgattcc

SEQ ID NO: 44246 - DNA, 19 bp, Homo Sapiens
agaccggggttcgattccc

SEQ ID NO: 44247 - DNA, 24 bp, Homo Sapiens
agaccggggttcgattccccgacg

SEQ ID NO: 44248 - DNA, 26 bp, Homo Sapiens
agaccggggttcgattccccgacggg

SEQ ID NO: 44249 - DNA, 28 bp, Homo Sapiens
agaccggggttcgattccccgacgggga

SEQ ID NO: 44250 - DNA, 29 bp, Homo Sapiens
agaccggggttcgattccccgacggggag

SEQ ID NO: 44251 - DNA, 30 bp, Homo Sapiens; identical to SEQ ID NO: 3861

SEQ ID NO: 44252 - DNA, 31 bp, Homo Sapiens; identical to SEQ ID NO: 3862

SEQ ID NO: 44253 - DNA, 32 bp, Homo Sapiens; identical to SEQ ID NO: 3863

SEQ ID NO: 44254 - DNA, 18 bp, Homo Sapiens
agacgggctcacatcacc

SEQ ID NO: 44255 - DNA, 27 bp, Homo Sapiens
agacgggctcacatcaccccataaaca

SEQ ID NO: 44256 - DNA, 29 bp, Homo Sapiens
agacgggctcacatcaccccataaacacc

SEQ ID NO: 44257 - DNA, 30 bp, Homo Sapiens; identical to SEQ ID NO: 3877

SEQ ID NO: 44258 - DNA, 37 bp, Homo Sapiens
agacttttaatctgagggtccagggttcaagtccctg

SEQ ID NO: 44259 - DNA, 16 bp, Homo Sapiens
agactttttctctgac

SEQ ID NO: 44260 - DNA, 17 bp, Homo Sapiens
agactttttctctgacc

SEQ ID NO: 44261 - DNA, 18 bp, Homo Sapiens
agactttttctctgacca

SEQ ID NO: 44262 - DNA, 27 bp, Homo Sapiens
agagaaccaacacctctttacagtgac

SEQ ID NO: 44263 - DNA, 28 bp, Homo Sapiens
agagaaccaacacctctttacagtgacc

SEQ ID NO: 44264 - DNA, 35 bp, Homo Sapiens; identical to SEQ ID NO: 3913

SEQ ID NO: 44265 - DNA, 21 bp, Homo Sapiens
agagcatgggactcttaatcc

SEQ ID NO: 44266 - DNA, 22 bp, Homo Sapiens
agagcatgggactcttaatccc

SEQ ID NO: 44267 - DNA, 32 bp, Homo Sapiens; identical to SEQ ID NO: 3921

SEQ ID NO: 44268 - DNA, 35 bp, Homo Sapiens; identical to SEQ ID NO: 3924

SEQ ID NO: 44269 - DNA, 43 bp, Homo Sapiens; identical to SEQ ID NO: 3927

SEQ ID NO: 44270 - DNA, 32 bp, Homo Sapiens; identical to SEQ ID NO: 32327

SEQ ID NO: 44271 - DNA, 27 bp, Homo Sapiens
agaggcttacgaccccttatttacccc

SEQ ID NO: 44272 - DNA, 32 bp, Homo Sapiens; identical to SEQ ID NO: 3960

SEQ ID NO: 44273 - DNA, 16 bp, Homo Sapiens
agaggtcgatggatcg

SEQ ID NO: 44274 - DNA, 21 bp, Homo Sapiens
agaggtcgatggatcgaaacc

SEQ ID NO: 44275 - DNA, 22 bp, Homo Sapiens
agaggtcgatggatcgaaacca

SEQ ID NO: 44276 - DNA, 23 bp, Homo Sapiens
agaggtcgatggatcgaaaccat

SEQ ID NO: 44277 - DNA, 28 bp, Homo Sapiens
agagtggcgcagcggaagcgtgctgggc

SEQ ID NO: 44278 - DNA, 30 bp, Homo Sapiens; identical to SEQ ID NO: 4009

SEQ ID NO: 44279 - DNA, 19 bp, Homo Sapiens
agatcaagaggtccccggt

SEQ ID NO: 44280 - DNA, 21 bp, Homo Sapiens
agatcagaaggctgcgtgttc

SEQ ID NO: 44281 - DNA, 37 bp, Homo Sapiens
agatcagaaggttgcgtgttcaaatcacgtcggggtc

SEQ ID NO: 44282 - DNA, 37 bp, Homo Sapiens; identical to SEQ ID NO: 4043

SEQ ID NO: 44283 - DNA, 21 bp, Homo Sapiens
agatcctgggttcgaatccca

SEQ ID NO: 44284 - DNA, 28 bp, Homo Sapiens
agatcctgggttcgaatcccagcggggc

SEQ ID NO: 44285 - DNA, 18 bp, Homo Sapiens
agatcgcgggttcgaacc

SEQ ID NO: 44286 - DNA, 20 bp, Homo Sapiens
agatcgcgggttcgaacccc

SEQ ID NO: 44287 - DNA, 24 bp, Homo Sapiens
agatgaaaacctttttccaaggac

SEQ ID NO: 44288 - DNA, 25 bp, Homo Sapiens
agatgaaaacctttttccaaggaca

SEQ ID NO: 44289 - DNA, 26 bp, Homo Sapiens
agatgaaaacctttttccaaggacac

SEQ ID NO: 44290 - DNA, 27 bp, Homo Sapiens
agatgaaaacctttttccaaggacacc

SEQ ID NO: 44291 - DNA, 28 bp, Homo Sapiens
agatgaaaacctttttccaaggacacca

SEQ ID NO: 44292 - DNA, 20 bp, Homo Sapiens
agattaagagaaccaacacc

SEQ ID NO: 44293 - DNA, 33 bp, Homo Sapiens; identical to SEQ ID NO: 4092

SEQ ID NO: 44294 - DNA, 35 bp, Homo Sapiens; identical to SEQ ID NO: 4094

SEQ ID NO: 44295 - DNA, 16 bp, Homo Sapiens
agattccaggttcgac

SEQ ID NO: 44296 - DNA, 18 bp, Homo Sapiens
agattccaggttcgactc

SEQ ID NO: 44297 - DNA, 25 bp, Homo Sapiens
agattcccattcttgcgacccgggt

SEQ ID NO: 44298 - DNA, 21 bp, Homo Sapiens
agattgagggttcgaatccct

SEQ ID NO: 44299 - DNA, 32 bp, Homo Sapiens; identical to SEQ ID NO: 4117

SEQ ID NO: 44300 - DNA, 18 bp, Homo Sapiens
agattgagggttcgagtc

SEQ ID NO: 44301 - DNA, 21 bp, Homo Sapiens
agattgagggttcgagtccct

SEQ ID NO: 44302 - DNA, 30 bp, Homo Sapiens; identical to SEQ ID NO: 4122

SEQ ID NO: 44303 - DNA, 31 bp, Homo Sapiens; identical to SEQ ID NO: 4123

SEQ ID NO: 44304 - DNA, 32 bp, Homo Sapiens; identical to SEQ ID NO: 4124

SEQ ID NO: 44305 - DNA, 33 bp, Homo Sapiens; identical to SEQ ID NO: 4125

SEQ ID NO: 44306 - DNA, 21 bp, Homo Sapiens
agattgcaggttcgagtcctg

SEQ ID NO: 44307 - DNA, 31 bp, Homo Sapiens; identical to SEQ ID NO: 4131

SEQ ID NO: 44308 - DNA, 32 bp, Homo Sapiens; identical to SEQ ID NO: 4132

SEQ ID NO: 44309 - DNA, 16 bp, Homo Sapiens
agattgtgaatctgac

SEQ ID NO: 44310 - DNA, 22 bp, Homo Sapiens
agattgtgaatctgacaacaga

SEQ ID NO: 44311 - DNA, 24 bp, Homo Sapiens
agattgtgaatctgacaacagagg

SEQ ID NO: 44312 - DNA, 25 bp, Homo Sapiens
agattgtgaatctgacaacagaggc

SEQ ID NO: 44313 - DNA, 26 bp, Homo Sapiens
agattgtgaatctgacaacagaggct

SEQ ID NO: 44314 - DNA, 27 bp, Homo Sapiens
agattgtgaatctgacaacagaggctt

SEQ ID NO: 44315 - DNA, 30 bp, Homo Sapiens; identical to SEQ ID NO: 4148

SEQ ID NO: 44316 - DNA, 31 bp, Homo Sapiens; identical to SEQ ID NO: 4149

SEQ ID NO: 44317 - DNA, 32 bp, Homo Sapiens; identical to SEQ ID NO: 4150

SEQ ID NO: 44318 - DNA, 33 bp, Homo Sapiens; identical to SEQ ID NO: 4151

SEQ ID NO: 44319 - DNA, 34 bp, Homo Sapiens; identical to SEQ ID NO: 4152

SEQ ID NO: 44320 - DNA, 35 bp, Homo Sapiens; identical to SEQ ID NO: 4153

SEQ ID NO: 44321 - DNA, 36 bp, Homo Sapiens; identical to SEQ ID NO: 4154

SEQ ID NO: 44322 - DNA, 37 bp, Homo Sapiens; identical to SEQ ID NO: 4155

SEQ ID NO: 44323 - DNA, 38 bp, Homo Sapiens; identical to SEQ ID NO: 4156

SEQ ID NO: 44324 - DNA, 40 bp, Homo Sapiens; identical to SEQ ID NO: 4158

SEQ ID NO: 44325 - DNA, 42 bp, Homo Sapiens; identical to SEQ ID NO: 4160

SEQ ID NO: 44326 - DNA, 43 bp, Homo Sapiens; identical to SEQ ID NO: 4161

SEQ ID NO: 44327 - DNA, 44 bp, Homo Sapiens; identical to SEQ ID NO: 4162

SEQ ID NO: 44328 - DNA, 45 bp, Homo Sapiens; identical to SEQ ID NO: 4163

SEQ ID NO: 44329 - DNA, 46 bp, Homo Sapiens; identical to SEQ ID NO: 4164

SEQ ID NO: 44330 - DNA, 47 bp, Homo Sapiens; identical to SEQ ID NO: 4165

SEQ ID NO: 44331 - DNA, 25 bp, Homo Sapiens
agatttcaacttaacttgaccgctc

SEQ ID NO: 44332 - DNA, 26 bp, Homo Sapiens
agatttcaacttaacttgaccgctct

SEQ ID NO: 44333 - DNA, 27 bp, Homo Sapiens
agatttcaacttaacttgaccgctctg

SEQ ID NO: 44334 - DNA, 28 bp, Homo Sapiens
agatttcaacttaacttgaccgctctga

SEQ ID NO: 44335 - DNA, 29 bp, Homo Sapiens
agatttcaacttaacttgaccgctctgac

SEQ ID NO: 44336 - DNA, 30 bp, Homo Sapiens; identical to SEQ ID NO: 4178

SEQ ID NO: 44337 - DNA, 31 bp, Homo Sapiens; identical to SEQ ID NO: 4179

SEQ ID NO: 44338 - DNA, 17 bp, Homo Sapiens
agcactctggactctga

SEQ ID NO: 44339 - DNA, 18 bp, Homo Sapiens
agcactctggactctgaa

SEQ ID NO: 44340 - DNA, 19 bp, Homo Sapiens
agcactctggactctgaat

SEQ ID NO: 44341 - DNA, 20 bp, Homo Sapiens
agcactctggactctgaatc

SEQ ID NO: 44342 - DNA, 21 bp, Homo Sapiens
agcactctggactctgaatcc

SEQ ID NO: 44343 - DNA, 22 bp, Homo Sapiens
agcactctggactctgaatcca

SEQ ID NO: 44344 - DNA, 23 bp, Homo Sapiens
agcactctggactctgaatccag

SEQ ID NO: 44345 - DNA, 24 bp, Homo Sapiens
agcactctggactctgaatccagc

SEQ ID NO: 44346 - DNA, 25 bp, Homo Sapiens
agcactctggactctgaatccagcg

SEQ ID NO: 44347 - DNA, 31 bp, Homo Sapiens; identical to SEQ ID NO: 4233

SEQ ID NO: 44348 - DNA, 32 bp, Homo Sapiens; identical to SEQ ID NO: 4234

SEQ ID NO: 44349 - DNA, 33 bp, Homo Sapiens; identical to SEQ ID NO: 4235

SEQ ID NO: 44350 - DNA, 34 bp, Homo Sapiens; identical to SEQ ID NO: 4236

SEQ ID NO: 44351 - DNA, 35 bp, Homo Sapiens; identical to SEQ ID NO: 4237

SEQ ID NO: 44352 - DNA, 36 bp, Homo Sapiens; identical to SEQ ID NO: 4238

SEQ ID NO: 44353 - DNA, 44 bp, Homo Sapiens; identical to SEQ ID NO: 4242

SEQ ID NO: 44354 - DNA, 18 bp, Homo Sapiens
agcactctggactttgaa

SEQ ID NO: 44355 - DNA, 20 bp, Homo Sapiens
agcactctggactttgaatc

SEQ ID NO: 44356 - DNA, 21 bp, Homo Sapiens
agcactctggactttgaatcc

SEQ ID NO: 44357 - DNA, 33 bp, Homo Sapiens; identical to SEQ ID NO: 4262

SEQ ID NO: 44358 - DNA, 16 bp, Homo Sapiens
agcagagtggcgcagc

SEQ ID NO: 44359 - DNA, 18 bp, Homo Sapiens
agcagagtggcgcagcgg

SEQ ID NO: 44360 - DNA, 19 bp, Homo Sapiens
agcagagtggcgcagcgga

SEQ ID NO: 44361 - DNA, 21 bp, Homo Sapiens
agcagagtggcgcagcggaag

SEQ ID NO: 44362 - DNA, 22 bp, Homo Sapiens
agcagagtggcgcagcggaagc

SEQ ID NO: 44363 - DNA, 23 bp, Homo Sapiens
agcagagtggcgcagcggaagcg

SEQ ID NO: 44364 - DNA, 26 bp, Homo Sapiens
agcagagtggcgcagcggaagcgtgc

SEQ ID NO: 44365 - DNA, 28 bp, Homo Sapiens
agcagagtggcgcagcggaagcgtgctg

SEQ ID NO: 44366 - DNA, 29 bp, Homo Sapiens
agcagagtggcgcagcggaagcgtgctgg

SEQ ID NO: 44367 - DNA, 30 bp, Homo Sapiens; identical to SEQ ID NO: 4283

SEQ ID NO: 44368 - DNA, 31 bp, Homo Sapiens; identical to SEQ ID NO: 4284

SEQ ID NO: 44369 - DNA, 32 bp, Homo Sapiens; identical to SEQ ID NO: 4285

SEQ ID NO: 44370 - DNA, 33 bp, Homo Sapiens; identical to SEQ ID NO: 4286

SEQ ID NO: 44371 - DNA, 34 bp, Homo Sapiens; identical to SEQ ID NO: 4287

SEQ ID NO: 44372 - DNA, 41 bp, Homo Sapiens
agcagagtggcgcagcggaagcgtgctgggcccataaccca

SEQ ID NO: 44373 - DNA, 42 bp, Homo Sapiens; identical to SEQ ID NO: 4291

SEQ ID NO: 44374 - DNA, 23 bp, Homo Sapiens
agcagcttcaaacctgccggggc

SEQ ID NO: 44375 - DNA, 24 bp, Homo Sapiens
agcagcttcaaacctgccggggct

SEQ ID NO: 44376 - DNA, 25 bp, Homo Sapiens
agcagcttcaaacctgccggggctt

SEQ ID NO: 44377 - DNA, 26 bp, Homo Sapiens
agcagcttcaaacctgccggggcttc

SEQ ID NO: 44378 - DNA, 27 bp, Homo Sapiens
agcagcttcaaacctgccggggcttcc

SEQ ID NO: 44379 - DNA, 32 bp, Homo Sapiens; identical to SEQ ID NO: 4308

SEQ ID NO: 44380 - DNA, 33 bp, Homo Sapiens; identical to SEQ ID NO: 4309

SEQ ID NO: 44381 - DNA, 38 bp, Homo Sapiens; identical to SEQ ID NO: 4312

SEQ ID NO: 44382 - DNA, 31 bp, Homo Sapiens; identical to SEQ ID NO: 4314

SEQ ID NO: 44383 - DNA, 17 bp, Homo Sapiens
agcatgggactcttaat

SEQ ID NO: 44384 - DNA, 18 bp, Homo Sapiens
agcatgggactcttaatc

SEQ ID NO: 44385 - DNA, 19 bp, Homo Sapiens
agcatgggactcttaatcc

SEQ ID NO: 44386 - DNA, 20 bp, Homo Sapiens
agcatgggactcttaatccc

SEQ ID NO: 44387 - DNA, 28 bp, Homo Sapiens
agcatgggactcttaatcccagggtcgt

SEQ ID NO: 44388 - DNA, 33 bp, Homo Sapiens; identical to SEQ ID NO: 4337

SEQ ID NO: 44389 - DNA, 18 bp, Homo Sapiens
agcatgggactcttcatc

SEQ ID NO: 44390 - DNA, 19 bp, Homo Sapiens
agcatgggactcttcatcc

SEQ ID NO: 44391 - DNA, 19 bp, Homo Sapiens
agcattggactgtaaatct

SEQ ID NO: 44392 - DNA, 31 bp, Homo Sapiens; identical to SEQ ID NO: 4369

SEQ ID NO: 44393 - DNA, 32 bp, Homo Sapiens; identical to SEQ ID NO: 4370

SEQ ID NO: 44394 - DNA, 33 bp, Homo Sapiens; identical to SEQ ID NO: 4371

SEQ ID NO: 44395 - DNA, 21 bp, Homo Sapiens
agcatttgactgcagatcaag

SEQ ID NO: 44396 - DNA, 19 bp, Homo Sapiens
agccagggattgtgggttc

SEQ ID NO: 44397 - DNA, 20 bp, Homo Sapiens
agccagggattgtgggttcg

SEQ ID NO: 44398 - DNA, 36 bp, Homo Sapiens; identical to SEQ ID NO: 4386

SEQ ID NO: 44399 - DNA, 38 bp, Homo Sapiens; identical to SEQ ID NO: 4397

SEQ ID NO: 44400 - DNA, 36 bp, Homo Sapiens; identical to SEQ ID NO: 4403

SEQ ID NO: 44401 - DNA, 37 bp, Homo Sapiens; identical to SEQ ID NO: 4404

SEQ ID NO: 44402 - DNA, 38 bp, Homo Sapiens; identical to SEQ ID NO: 4405

SEQ ID NO: 44403 - DNA, 39 bp, Homo Sapiens; identical to SEQ ID NO: 4406

SEQ ID NO: 44404 - DNA, 18 bp, Homo Sapiens
agcccacccagggacgcc

SEQ ID NO: 44405 - DNA, 19 bp, Homo Sapiens
agcccacccagggacgcca

SEQ ID NO: 44406 - DNA, 18 bp, Homo Sapiens
agccccagtggaaccacc

SEQ ID NO: 44407 - DNA, 16 bp, Homo Sapiens
agccgtgatcgtatag

SEQ ID NO: 44408 - DNA, 17 bp, Homo Sapiens
agccgtgatcgtatagt

SEQ ID NO: 44409 - DNA, 19 bp, Homo Sapiens
agccgtgatcgtatagtgg

SEQ ID NO: 44410 - DNA, 21 bp, Homo Sapiens
agccgtgatcgtatagtggtt

SEQ ID NO: 44411 - DNA, 22 bp, Homo Sapiens
agccgtgatcgtatagtggtta

SEQ ID NO: 44412 - DNA, 23 bp, Homo Sapiens
agccgtgatcgtatagtggttag

SEQ ID NO: 44413 - DNA, 24 bp, Homo Sapiens
agccgtgatcgtatagtggttagt

SEQ ID NO: 44414 - DNA, 27 bp, Homo Sapiens
agccgtgatcgtatagtggttagtact

SEQ ID NO: 44415 - DNA, 28 bp, Homo Sapiens
agccgtgatcgtatagtggttagtactc

SEQ ID NO: 44416 - DNA, 29 bp, Homo Sapiens
agccgtgatcgtatagtggttagtactct

SEQ ID NO: 44417 - DNA, 30 bp, Homo Sapiens; identical to SEQ ID NO: 4451

SEQ ID NO: 44418 - DNA, 31 bp, Homo Sapiens; identical to SEQ ID NO: 4452

SEQ ID NO: 44419 - DNA, 32 bp, Homo Sapiens; identical to SEQ ID NO: 4453

SEQ ID NO: 44420 - DNA, 33 bp, Homo Sapiens; identical to SEQ ID NO: 4454

SEQ ID NO: 44421 - DNA, 34 bp, Homo Sapiens; identical to SEQ ID NO: 4455

SEQ ID NO: 44422 - DNA, 35 bp, Homo Sapiens; identical to SEQ ID NO: 4456

SEQ ID NO: 44423 - DNA, 36 bp, Homo Sapiens; identical to SEQ ID NO: 4457

SEQ ID NO: 44424 - DNA, 18 bp, Homo Sapiens
agcctcacctggagcacc

SEQ ID NO: 44425 - DNA, 19 bp, Homo Sapiens
agcctcacctggagcacca

SEQ ID NO: 44426 - DNA, 29 bp, Homo Sapiens
agcgatccgagttcaaatctcggtggaac

SEQ ID NO: 44427 - DNA, 32 bp, Homo Sapiens; identical to SEQ ID NO: 4471

SEQ ID NO: 44428 - DNA, 33 bp, Homo Sapiens; identical to SEQ ID NO: 4472

SEQ ID NO: 44429 - DNA, 29 bp, Homo Sapiens
agcgatccgagttcaaatctcggtgggac

SEQ ID NO: 44430 - DNA, 31 bp, Homo Sapiens; identical to SEQ ID NO: 4475

SEQ ID NO: 44431 - DNA, 32 bp, Homo Sapiens; identical to SEQ ID NO: 4476

SEQ ID NO: 44432 - DNA, 32 bp, Homo Sapiens; identical to SEQ ID NO: 4484

SEQ ID NO: 44433 - DNA, 23 bp, Homo Sapiens
agcgcgttcggctgttaaccgga

SEQ ID NO: 44434 - DNA, 17 bp, Homo Sapiens
agcggaagcgtgctggg

SEQ ID NO: 44435 - DNA, 18 bp, Homo Sapiens
agcggaagcgtgctgggc

SEQ ID NO: 44436 - DNA, 19 bp, Homo Sapiens
agcggaagcgtgctgggcc

SEQ ID NO: 44437 - DNA, 20 bp, Homo Sapiens
agcggaagcgtgctgggccc

SEQ ID NO: 44438 - DNA, 21 bp, Homo Sapiens
agcggaagcgtgctgggccca

SEQ ID NO: 44439 - DNA, 26 bp, Homo Sapiens
agcggaagcgtgctgggcccataacc

SEQ ID NO: 44440 - DNA, 17 bp, Homo Sapiens
agcggtctaaggcgctg

SEQ ID NO: 44441 - DNA, 21 bp, Homo Sapiens
agcggtctaaggcgctggatt

SEQ ID NO: 44442 - DNA, 19 bp, Homo Sapiens
agcggttaggattcctggt

SEQ ID NO: 44443 - DNA, 16 bp, Homo Sapiens
agcgtgctgggcccat

SEQ ID NO: 44444 - DNA, 19 bp, Homo Sapiens
agcgtgctgggcccataac

SEQ ID NO: 44445 - DNA, 20 bp, Homo Sapiens
agcgtgctgggcccataacc

SEQ ID NO: 44446 - DNA, 21 bp, Homo Sapiens
agcgtgctgggcccataaccc

SEQ ID NO: 44447 - DNA, 32 bp, Homo Sapiens; identical to SEQ ID NO: 4528

SEQ ID NO: 44448 - DNA, 35 bp, Homo Sapiens; identical to SEQ ID NO: 4530

SEQ ID NO: 44449 - DNA, 23 bp, Homo Sapiens
agcgtggccgagtggtctaaggc

SEQ ID NO: 44450 - DNA, 18 bp, Homo Sapiens
agctatcgggcccatacc

SEQ ID NO: 44451 - DNA, 20 bp, Homo Sapiens
agctatcgggcccatacccc

SEQ ID NO: 44452 - DNA, 28 bp, Homo Sapiens
agctcacaagaactgctaactcatgccc

SEQ ID NO: 44453 - DNA, 33 bp, Homo Sapiens; identical to SEQ ID NO: 4606

SEQ ID NO: 44454 - DNA, 16 bp, Homo Sapiens
agctcagtcggtagag

SEQ ID NO: 44455 - DNA, 24 bp, Homo Sapiens
agctcagtcggtagagcatcagac

SEQ ID NO: 44456 - DNA, 25 bp, Homo Sapiens
agctcagtcggtagagcatcagact

SEQ ID NO: 44457 - DNA, 24 bp, Homo Sapiens
agctcagtcggtagagcatgagac

SEQ ID NO: 44458 - DNA, 25 bp, Homo Sapiens
agctcagtcggtagagcatgagact

SEQ ID NO: 44459 - DNA, 24 bp, Homo Sapiens
agctcagtcggtagagcatgggac

SEQ ID NO: 44460 - DNA, 25 bp, Homo Sapiens
agctcagtcggtagagcatgggact

SEQ ID NO: 44461 - DNA, 26 bp, Homo Sapiens
agctcagtcggtagagcatgggactc

SEQ ID NO: 44462 - DNA, 27 bp, Homo Sapiens
agctcagtcggtagagcatgggactct

SEQ ID NO: 44463 - DNA, 33 bp, Homo Sapiens; identical to SEQ ID NO: 4660

SEQ ID NO: 44464 - DNA, 24 bp, Homo Sapiens
agctccgaggtgattttcatattg

SEQ ID NO: 44465 - DNA, 29 bp, Homo Sapiens
agctccgaggtgattttcatattgaattg

SEQ ID NO: 44466 - DNA, 30 bp, Homo Sapiens; identical to SEQ ID NO: 4685

SEQ ID NO: 44467 - DNA, 38 bp, Homo Sapiens; identical to SEQ ID NO: 4693

SEQ ID NO: 44468 - DNA, 39 bp, Homo Sapiens; identical to SEQ ID NO: 4694

SEQ ID NO: 44469 - DNA, 45 bp, Homo Sapiens; identical to SEQ ID NO: 4700

SEQ ID NO: 44470 - DNA, 26 bp, Homo Sapiens
agctgccttccaagcagttgacccgg

SEQ ID NO: 44471 - DNA, 20 bp, Homo Sapiens
agctggggattgtgggttcg

SEQ ID NO: 44472 - DNA, 37 bp, Homo Sapiens; identical to SEQ ID NO: 4717

SEQ ID NO: 44473 - DNA, 38 bp, Homo Sapiens; identical to SEQ ID NO: 4718

SEQ ID NO: 44474 - DNA, 21 bp, Homo Sapiens
agcttaacacaaagcacccaa

SEQ ID NO: 44475 - DNA, 20 bp, Homo Sapiens
agcttcaaacctgccggggc

SEQ ID NO: 44476 - DNA, 21 bp, Homo Sapiens
agcttcaaacctgccggggct

SEQ ID NO: 44477 - DNA, 22 bp, Homo Sapiens
agcttcaaacctgccggggctt

SEQ ID NO: 44478 - DNA, 25 bp, Homo Sapiens
agcttcaaacctgccggggcttcca

SEQ ID NO: 44479 - DNA, 16 bp, Homo Sapiens
agctttggggggttcg

SEQ ID NO: 44480 - DNA, 16 bp, Homo Sapiens
aggagatcctgggttc

SEQ ID NO: 44481 - DNA, 27 bp, Homo Sapiens
aggagatcctgggttcgaatcccagcg

SEQ ID NO: 44482 - DNA, 31 bp, Homo Sapiens; identical to SEQ ID NO: 4805

SEQ ID NO: 44483 - DNA, 33 bp, Homo Sapiens; identical to SEQ ID NO: 4807

SEQ ID NO: 44484 - DNA, 30 bp, Homo Sapiens; identical to SEQ ID NO: 4810

SEQ ID NO: 44485 - DNA, 32 bp, Homo Sapiens; identical to SEQ ID NO: 4812

SEQ ID NO: 44486 - DNA, 33 bp, Homo Sapiens; identical to SEQ ID NO: 4813

SEQ ID NO: 44487 - DNA, 35 bp, Homo Sapiens; identical to SEQ ID NO: 4815

SEQ ID NO: 44488 - DNA, 18 bp, Homo Sapiens
aggagatttcaacttaac

SEQ ID NO: 44489 - DNA, 24 bp, Homo Sapiens
aggagatttcaacttaacttgacc

SEQ ID NO: 44490 - DNA, 28 bp, Homo Sapiens
aggagatttcaacttaacttgaccgctc

SEQ ID NO: 44491 - DNA, 29 bp, Homo Sapiens
aggagatttcaacttaacttgaccgctct

SEQ ID NO: 44492 - DNA, 30 bp, Homo Sapiens; identical to SEQ ID NO: 4838

SEQ ID NO: 44493 - DNA, 31 bp, Homo Sapiens; identical to SEQ ID NO: 4839

SEQ ID NO: 44494 - DNA, 32 bp, Homo Sapiens; identical to SEQ ID NO: 4840

SEQ ID NO: 44495 - DNA, 33 bp, Homo Sapiens; identical to SEQ ID NO: 4841

SEQ ID NO: 44496 - DNA, 34 bp, Homo Sapiens; identical to SEQ ID NO: 4842

SEQ ID NO: 44497 - DNA, 16 bp, Homo Sapiens
aggagcttaaaccccc

SEQ ID NO: 44498 - DNA, 27 bp, Homo Sapiens
aggagcttaaacccccttatttctacc

SEQ ID NO: 44499 - DNA, 23 bp, Homo Sapiens
aggataacagctatccattggtc

SEQ ID NO: 44500 - DNA, 17 bp, Homo Sapiens
aggatggccgagcggtc

SEQ ID NO: 44501 - DNA, 18 bp, Homo Sapiens
aggatggccgagcggtct

SEQ ID NO: 44502 - DNA, 19 bp, Homo Sapiens
aggatggccgagcggtcta

SEQ ID NO: 44503 - DNA, 20 bp, Homo Sapiens
aggatggccgagcggtctaa

SEQ ID NO: 44504 - DNA, 21 bp, Homo Sapiens
aggatggccgagcggtctaag

SEQ ID NO: 44505 - DNA, 22 bp, Homo Sapiens
aggatggccgagcggtctaagg

SEQ ID NO: 44506 - DNA, 23 bp, Homo Sapiens
aggatggccgagcggtctaaggc

SEQ ID NO: 44507 - DNA, 27 bp, Homo Sapiens
aggatggccgagcggtctaaggcgctg

SEQ ID NO: 44508 - DNA, 29 bp, Homo Sapiens
aggatggccgagcggtctaaggcgctgcg

SEQ ID NO: 44509 - DNA, 21 bp, Homo Sapiens
aggatggccgagtggtctaag

SEQ ID NO: 44510 - DNA, 23 bp, Homo Sapiens
aggatggccgagtggtctaaggc

SEQ ID NO: 44511 - DNA, 20 bp, Homo Sapiens
aggatggccgagtggttaag

SEQ ID NO: 44512 - DNA, 22 bp, Homo Sapiens
aggatggccgagtggttaaggc

SEQ ID NO: 44513 - DNA, 29 bp, Homo Sapiens
aggatggggtgtgataggtggcacggaga

SEQ ID NO: 44514 - DNA, 30 bp, Homo Sapiens; identical to SEQ ID NO: 4890

SEQ ID NO: 44515 - DNA, 31 bp, Homo Sapiens; identical to SEQ ID NO: 4891

SEQ ID NO: 44516 - DNA, 32 bp, Homo Sapiens; identical to SEQ ID NO: 4892

SEQ ID NO: 44517 - DNA, 33 bp, Homo Sapiens; identical to SEQ ID NO: 4893

SEQ ID NO: 44518 - DNA, 35 bp, Homo Sapiens; identical to SEQ ID NO: 4895

SEQ ID NO: 44519 - DNA, 42 bp, Homo Sapiens
aggatggggtgtgataggtggcacggagaattttggattctc

SEQ ID NO: 44520 - DNA, 28 bp, Homo Sapiens
aggattcctggttttcacccaggcggcc

SEQ ID NO: 44521 - DNA, 38 bp, Homo Sapiens; identical to SEQ ID NO: 32640

SEQ ID NO: 44522 - DNA, 40 bp, Homo Sapiens
aggattcctggttttcacccaggcggcccgggttcgactc

SEQ ID NO: 44523 - DNA, 41 bp, Homo Sapiens
aggattcctggttttcacccaggcggcccgggttcgactcc

SEQ ID NO: 44524 - DNA, 25 bp, Homo Sapiens
aggattcctggttttcacccaggtg

SEQ ID NO: 44525 - DNA, 16 bp, Homo Sapiens
aggattcggcgctctc

SEQ ID NO: 44526 - DNA, 17 bp, Homo Sapiens
aggattcggcgctctca

SEQ ID NO: 44527 - DNA, 18 bp, Homo Sapiens
aggattcggcgctctcac

SEQ ID NO: 44528 - DNA, 19 bp, Homo Sapiens
aggattcggcgctctcacc

SEQ ID NO: 44529 - DNA, 20 bp, Homo Sapiens
aggattcggcgctctcaccg

SEQ ID NO: 44530 - DNA, 22 bp, Homo Sapiens
aggattcggcgctctcaccgcc

SEQ ID NO: 44531 - DNA, 27 bp, Homo Sapiens
aggattcggcgctctcaccgccgcggc

SEQ ID NO: 44532 - DNA, 28 bp, Homo Sapiens
aggattcggcgctctcaccgccgcggcc

SEQ ID NO: 44533 - DNA, 29 bp, Homo Sapiens
aggattcggcgctctcaccgccgcggccc

SEQ ID NO: 44534 - DNA, 31 bp, Homo Sapiens; identical to SEQ ID NO: 4919

SEQ ID NO: 44535 - DNA, 32 bp, Homo Sapiens; identical to SEQ ID NO: 4920

SEQ ID NO: 44536 - DNA, 33 bp, Homo Sapiens; identical to SEQ ID NO: 4921

SEQ ID NO: 44537 - DNA, 41 bp, Homo Sapiens
aggattcggcgctctcaccgccgcggcccgggttcgattcc

SEQ ID NO: 44538 - DNA, 28 bp, Homo Sapiens
aggcatcagcctccggagctggggattg

SEQ ID NO: 44539 - DNA, 29 bp, Homo Sapiens
aggcatcagcctccggagctggggattgt

SEQ ID NO: 44540 - DNA, 20 bp, Homo Sapiens
aggcattggcctcctaagcc

SEQ ID NO: 44541 - DNA, 29 bp, Homo Sapiens
aggcattggcctcctaagccagggattgt

SEQ ID NO: 44542 - DNA, 26 bp, Homo Sapiens
aggccccgggttcaatccccggcacc

SEQ ID NO: 44543 - DNA, 32 bp, Homo Sapiens; identical to SEQ ID NO: 4949

SEQ ID NO: 44544 - DNA, 33 bp, Homo Sapiens; identical to SEQ ID NO: 4950

SEQ ID NO: 44545 - DNA, 17 bp, Homo Sapiens
aggccccgggttcgatc

SEQ ID NO: 44546 - DNA, 20 bp, Homo Sapiens
aggccccgggttcgatcccc

SEQ ID NO: 44547 - DNA, 32 bp, Homo Sapiens; identical to SEQ ID NO: 4951

SEQ ID NO: 44548 - DNA, 33 bp, Homo Sapiens; identical to SEQ ID NO: 4952

SEQ ID NO: 44549 - DNA, 18 bp, Homo Sapiens
aggcggcccgggttcgac

SEQ ID NO: 44550 - DNA, 21 bp, Homo Sapiens
aggcggcccgggttcgactcc

SEQ ID NO: 44551 - DNA, 22 bp, Homo Sapiens
aggcggcccgggttcgactccc

SEQ ID NO: 44552 - DNA, 25 bp, Homo Sapiens
aggcggcccgggttcgactcccggt

SEQ ID NO: 44553 - DNA, 26 bp, Homo Sapiens
aggcggcccgggttcgactcccggtg

SEQ ID NO: 44554 - DNA, 27 bp, Homo Sapiens
aggcggcccgggttcgactcccggtgt

SEQ ID NO: 44555 - DNA, 28 bp, Homo Sapiens
aggcggcccgggttcgactcccggtgtg

SEQ ID NO: 44556 - DNA, 29 bp, Homo Sapiens
aggcggcccgggttcgactcccggtgtgg

SEQ ID NO: 44557 - DNA, 30 bp, Homo Sapiens; identical to SEQ ID NO: 4967

SEQ ID NO: 44558 - DNA, 31 bp, Homo Sapiens; identical to SEQ ID NO: 4968

SEQ ID NO: 44559 - DNA, 32 bp, Homo Sapiens; identical to SEQ ID NO: 4969

SEQ ID NO: 44560 - DNA, 33 bp, Homo Sapiens; identical to SEQ ID NO: 4970

SEQ ID NO: 44561 - DNA, 34 bp, Homo Sapiens; identical to SEQ ID NO: 4971

SEQ ID NO: 44562 - DNA, 35 bp, Homo Sapiens; identical to SEQ ID NO: 4972

SEQ ID NO: 44563 - DNA, 46 bp, Homo Sapiens
aggctccagtctcttcgggggcgtgggttcgaatcccaccgctgcc

SEQ ID NO: 44564 - DNA, 18 bp, Homo Sapiens
aggctgcgtgttcgaatc

SEQ ID NO: 44565 - DNA, 23 bp, Homo Sapiens
aggctgcgtgttcgaatcacgtc

SEQ ID NO: 44566 - DNA, 25 bp, Homo Sapiens
aggcttacgaccccttatttacccc

SEQ ID NO: 44567 - DNA, 27 bp, Homo Sapiens
agggatgggttcgattctcatagtcct

SEQ ID NO: 44568 - DNA, 16 bp, Homo Sapiens
agggattgtgggttcg

SEQ ID NO: 44569 - DNA, 21 bp, Homo Sapiens
agggattgtgggttcgagtcc

SEQ ID NO: 44570 - DNA, 22 bp, Homo Sapiens
agggattgtgggttcgagtccc

SEQ ID NO: 44571 - DNA, 23 bp, Homo Sapiens
agggattgtgggttcgagtccca

SEQ ID NO: 44572 - DNA, 25 bp, Homo Sapiens
agggattgtgggttcgagtcccacc

SEQ ID NO: 44573 - DNA, 30 bp, Homo Sapiens; identical to SEQ ID NO: 5013

SEQ ID NO: 44574 - DNA, 31 bp, Homo Sapiens; identical to SEQ ID NO: 5014

SEQ ID NO: 44575 - DNA, 32 bp, Homo Sapiens; identical to SEQ ID NO: 5015

SEQ ID NO: 44576 - DNA, 33 bp, Homo Sapiens; identical to SEQ ID NO: 5016

SEQ ID NO: 44577 - DNA, 34 bp, Homo Sapiens; identical to SEQ ID NO: 5017

SEQ ID NO: 44578 - DNA, 35 bp, Homo Sapiens; identical to SEQ ID NO: 5018

SEQ ID NO: 44579 - DNA, 26 bp, Homo Sapiens
agggattgtgggttcgagtcccacct

SEQ ID NO: 44580 - DNA, 31 bp, Homo Sapiens; identical to SEQ ID NO: 5019

SEQ ID NO: 44581 - DNA, 34 bp, Homo Sapiens; identical to SEQ ID NO: 5022

SEQ ID NO: 44582 - DNA, 35 bp, Homo Sapiens; identical to SEQ ID NO: 5023

SEQ ID NO: 44583 - DNA, 34 bp, Homo Sapiens; identical to SEQ ID NO: 5026

SEQ ID NO: 44584 - DNA, 35 bp, Homo Sapiens; identical to SEQ ID NO: 5027

SEQ ID NO: 44585 - DNA, 25 bp, Homo Sapiens
agggattgtgggttcgagtcccatc

SEQ ID NO: 44586 - DNA, 26 bp, Homo Sapiens
agggattgtgggttcgagtcccatct

SEQ ID NO: 44587 - DNA, 27 bp, Homo Sapiens
agggattgtgggttcgagtcccatctg

SEQ ID NO: 44588 - DNA, 29 bp, Homo Sapiens
agggattgtgggttcgagtcccatctggg

SEQ ID NO: 44589 - DNA, 30 bp, Homo Sapiens; identical to SEQ ID NO: 5031

SEQ ID NO: 44590 - DNA, 31 bp, Homo Sapiens; identical to SEQ ID NO: 5032

SEQ ID NO: 44591 - DNA, 32 bp, Homo Sapiens; identical to SEQ ID NO: 5033

SEQ ID NO: 44592 - DNA, 33 bp, Homo Sapiens; identical to SEQ ID NO: 5034

SEQ ID NO: 44593 - DNA, 34 bp, Homo Sapiens; identical to SEQ ID NO: 5035

SEQ ID NO: 44594 - DNA, 35 bp, Homo Sapiens; identical to SEQ ID NO: 5036

SEQ ID NO: 44595 - DNA, 19 bp, Homo Sapiens
aggggtagagcatttgact

SEQ ID NO: 44596 - DNA, 21 bp, Homo Sapiens
aggggtagagcatttgactgc

SEQ ID NO: 44597 - DNA, 17 bp, Homo Sapiens
aggggtatgattctcgc

SEQ ID NO: 44598 - DNA, 18 bp, Homo Sapiens
aggggtatgattctcgct

SEQ ID NO: 44599 - DNA, 19 bp, Homo Sapiens
aggggtatgattctcgctt

SEQ ID NO: 44600 - DNA, 18 bp, Homo Sapiens
aggggtatgattctcggt

SEQ ID NO: 44601 - DNA, 19 bp, Homo Sapiens
aggggtatgattctcggtt

SEQ ID NO: 44602 - DNA, 33 bp, Homo Sapiens; identical to SEQ ID NO: 5057

SEQ ID NO: 44603 - DNA, 33 bp, Homo Sapiens; identical to SEQ ID NO: 5063

SEQ ID NO: 44604 - DNA, 18 bp, Homo Sapiens
aggggttagagcactggt

SEQ ID NO: 44605 - DNA, 30 bp, Homo Sapiens; identical to SEQ ID NO: 5073

SEQ ID NO: 44606 - DNA, 31 bp, Homo Sapiens; identical to SEQ ID NO: 5074

SEQ ID NO: 44607 - DNA, 32 bp, Homo Sapiens; identical to SEQ ID NO: 5075

SEQ ID NO: 44608 - DNA, 33 bp, Homo Sapiens; identical to SEQ ID NO: 5076

SEQ ID NO: 44609 - DNA, 34 bp, Homo Sapiens; identical to SEQ ID NO: 5077

SEQ ID NO: 44610 - DNA, 21 bp, Homo Sapiens
agggtcgtgggttcgagcccc

SEQ ID NO: 44611 - DNA, 22 bp, Homo Sapiens
agggtcgtgggttcgagcccca

SEQ ID NO: 44612 - DNA, 24 bp, Homo Sapiens
agggtcgtgggttcgagccccacg

SEQ ID NO: 44613 - DNA, 30 bp, Homo Sapiens; identical to SEQ ID NO: 5086

SEQ ID NO: 44614 - DNA, 31 bp, Homo Sapiens; identical to SEQ ID NO: 5087

SEQ ID NO: 44615 - DNA, 32 bp, Homo Sapiens; identical to SEQ ID NO: 5088

SEQ ID NO: 44616 - DNA, 33 bp, Homo Sapiens; identical to SEQ ID NO: 5089

SEQ ID NO: 44617 - DNA, 34 bp, Homo Sapiens; identical to SEQ ID NO: 5090

SEQ ID NO: 44618 - DNA, 19 bp, Homo Sapiens
agggtggccgagcggtcta

SEQ ID NO: 44619 - DNA, 21 bp, Homo Sapiens
agggtggccgagcggtctaag

SEQ ID NO: 44620 - DNA, 23 bp, Homo Sapiens
agggtggccgagcggtctaaggc

SEQ ID NO: 44621 - DNA, 23 bp, Homo Sapiens
agggttcaagtccctgttcgggc

SEQ ID NO: 44622 - DNA, 24 bp, Homo Sapiens
agggttcaagtccctgttcgggcg

SEQ ID NO: 44623 - DNA, 25 bp, Homo Sapiens
agggttcaagtccctgttcgggcgc

SEQ ID NO: 44624 - DNA, 26 bp, Homo Sapiens
agggttcaagtccctgttcgggcgcc

SEQ ID NO: 44625 - DNA, 27 bp, Homo Sapiens
agggttcaagtccctgttcgggcgcca

SEQ ID NO: 44626 - DNA, 25 bp, Homo Sapiens
agggttcgagtcccttcgtggtcgc

SEQ ID NO: 44627 - DNA, 26 bp, Homo Sapiens
agggttcgagtcccttcgtggtcgcc

SEQ ID NO: 44628 - DNA, 16 bp, Homo Sapiens
aggtagcgcgtcagtc

SEQ ID NO: 44629 - DNA, 24 bp, Homo Sapiens
aggtcagctaaataagctatcggg

SEQ ID NO: 44630 - DNA, 19 bp, Homo Sapiens
aggtccccggttcgaaacc

SEQ ID NO: 44631 - DNA, 30 bp, Homo Sapiens; identical to SEQ ID NO: 5130

SEQ ID NO: 44632 - DNA, 32 bp, Homo Sapiens; identical to SEQ ID NO: 5134

SEQ ID NO: 44633 - DNA, 33 bp, Homo Sapiens
aggtcccgggttcgatccccggcatctccacca

SEQ ID NO: 44634 - DNA, 18 bp, Homo Sapiens
aggtccctggttcaaatc

SEQ ID NO: 44635 - DNA, 19 bp, Homo Sapiens
aggtccctggttcaaatcc

SEQ ID NO: 44636 - DNA, 19 bp, Homo Sapiens
aggtccctggttcgatccc

SEQ ID NO: 44637 - DNA, 31 bp, Homo Sapiens; identical to SEQ ID NO: 5138

SEQ ID NO: 44638 - DNA, 33 bp, Homo Sapiens; identical to SEQ ID NO: 5139

SEQ ID NO: 44639 - DNA, 17 bp, Homo Sapiens
aggtcctgagttcgaac

SEQ ID NO: 44640 - DNA, 29 bp, Homo Sapiens
aggtcctgagttcgaacctcagagggggc

SEQ ID NO: 44641 - DNA, 30 bp, Homo Sapiens
aggtcctgagttcgaacctcagagggggca

SEQ ID NO: 44642 - DNA, 20 bp, Homo Sapiens
aggtcctgggttcgagcccc

SEQ ID NO: 44643 - DNA, 29 bp, Homo Sapiens
aggtcctgggttcgagccccagtggaacc

SEQ ID NO: 44644 - DNA, 31 bp, Homo Sapiens; identical to SEQ ID NO: 5149

SEQ ID NO: 44645 - DNA, 32 bp, Homo Sapiens; identical to SEQ ID NO: 5150

SEQ ID NO: 44646 - DNA, 33 bp, Homo Sapiens; identical to SEQ ID NO: 5151

SEQ ID NO: 44647 - DNA, 18 bp, Homo Sapiens
aggtcgatggatcgaaac

SEQ ID NO: 44648 - DNA, 19 bp, Homo Sapiens
aggtcgatggatcgaaacc

SEQ ID NO: 44649 - DNA, 20 bp, Homo Sapiens
aggtcgatggatcgaaacca

SEQ ID NO: 44650 - DNA, 21 bp, Homo Sapiens
aggtcgatggatcgaaaccat

SEQ ID NO: 44651 - DNA, 31 bp, Homo Sapiens
aggtcgcagtctcccctggaggcgtgggttc

SEQ ID NO: 44652 - DNA, 18 bp, Homo Sapiens
aggtcgcgggttcgatcc

SEQ ID NO: 44653 - DNA, 20 bp, Homo Sapiens
aggtcgcgggttcgatcccc

SEQ ID NO: 44654 - DNA, 23 bp, Homo Sapiens
aggtcgcgggttcgatccccgta

SEQ ID NO: 44655 - DNA, 28 bp, Homo Sapiens
aggtcgcgggttcgatccccgtacgggc

SEQ ID NO: 44656 - DNA, 29 bp, Homo Sapiens
aggtcgcgggttcgatccccgtacgggcc

SEQ ID NO: 44657 - DNA, 30 bp, Homo Sapiens; identical to SEQ ID NO: 5165

SEQ ID NO: 44658 - DNA, 32 bp, Homo Sapiens; identical to SEQ ID NO: 5167

SEQ ID NO: 44659 - DNA, 33 bp, Homo Sapiens; identical to SEQ ID NO: 5168

SEQ ID NO: 44660 - DNA, 31 bp, Homo Sapiens; identical to SEQ ID NO: 5170

SEQ ID NO: 44661 - DNA, 32 bp, Homo Sapiens; identical to SEQ ID NO: 5171

SEQ ID NO: 44662 - DNA, 33 bp, Homo Sapiens; identical to SEQ ID NO: 5172

SEQ ID NO: 44663 - DNA, 31 bp, Homo Sapiens; identical to SEQ ID NO: 5179

SEQ ID NO: 44664 - DNA, 32 bp, Homo Sapiens; identical to SEQ ID NO: 5180

SEQ ID NO: 44665 - DNA, 33 bp, Homo Sapiens; identical to SEQ ID NO: 5181

SEQ ID NO: 44666 - DNA, 19 bp, Homo Sapiens
aggtcgtgagttcgagcct

SEQ ID NO: 44667 - DNA, 18 bp, Homo Sapiens
aggtcgtgagttcgatcc

SEQ ID NO: 44668 - DNA, 17 bp, Homo Sapiens
aggtcgtgggttcgatc

SEQ ID NO: 44669 - DNA, 18 bp, Homo Sapiens
aggtggcccgggttcgac

SEQ ID NO: 44670 - DNA, 19 bp, Homo Sapiens
aggtggcccgggttcgact

SEQ ID NO: 44671 - DNA, 21 bp, Homo Sapiens
aggtggcccgggttcgactcc

SEQ ID NO: 44672 - DNA, 22 bp, Homo Sapiens
aggtggcccgggttcgactccc

SEQ ID NO: 44673 - DNA, 33 bp, Homo Sapiens; identical to SEQ ID NO: 5217

SEQ ID NO: 44674 - DNA, 34 bp, Homo Sapiens; identical to SEQ ID NO: 5218

SEQ ID NO: 44675 - DNA, 35 bp, Homo Sapiens; identical to SEQ ID NO: 5219

SEQ ID NO: 44676 - DNA, 19 bp, Homo Sapiens
aggtggccgagtggttaag

SEQ ID NO: 44677 - DNA, 20 bp, Homo Sapiens
aggttccgggttcgagtccc

SEQ ID NO: 44678 - DNA, 21 bp, Homo Sapiens
aggttccgggttcgagtcccg

SEQ ID NO: 44679 - DNA, 23 bp, Homo Sapiens
aggttccgggttcgagtcccggc

SEQ ID NO: 44680 - DNA, 27 bp, Homo Sapiens
aggttccgggttcgagtcccggcggag

SEQ ID NO: 44681 - DNA, 29 bp, Homo Sapiens
aggttccgggttcgagtcccggcggagtc

SEQ ID NO: 44682 - DNA, 32 bp, Homo Sapiens; identical to SEQ ID NO: 5229

SEQ ID NO: 44683 - DNA, 25 bp, Homo Sapiens
aggttcgaaccctgctcgctgcgcc

SEQ ID NO: 44684 - DNA, 25 bp, Homo Sapiens
aggttcgaatcctgttcgtgacgcc

SEQ ID NO: 44685 - DNA, 25 bp, Homo Sapiens
aggttcgactcctggctggctcgcc

SEQ ID NO: 44686 - DNA, 17 bp, Homo Sapiens
aggttggtggttcgagc

SEQ ID NO: 44687 - DNA, 32 bp, Homo Sapiens; identical to SEQ ID NO: 5257

SEQ ID NO: 44688 - DNA, 32 bp, Homo Sapiens; identical to SEQ ID NO: 5263

SEQ ID NO: 44689 - DNA, 32 bp, Homo Sapiens; identical to SEQ ID NO: 5266

SEQ ID NO: 44690 - DNA, 27 bp, Homo Sapiens
agtaaataataggagcttaaaccccct

SEQ ID NO: 44691 - DNA, 17 bp, Homo Sapiens
agtaaggtcagctaaat

SEQ ID NO: 44692 - DNA, 20 bp, Homo Sapiens
agtaaggtcagctaaataag

SEQ ID NO: 44693 - DNA, 21 bp, Homo Sapiens
agtaaggtcagctaaataagc

SEQ ID NO: 44694 - DNA, 28 bp, Homo Sapiens
agtaaggtcagctaaataagctatcggg

SEQ ID NO: 44695 - DNA, 29 bp, Homo Sapiens
agtaaggtcagctaaataagctatcgggc

SEQ ID NO: 44696 - DNA, 30 bp, Homo Sapiens; identical to SEQ ID NO: 5300

SEQ ID NO: 44697 - DNA, 31 bp, Homo Sapiens; identical to SEQ ID NO: 5301

SEQ ID NO: 44698 - DNA, 32 bp, Homo Sapiens; identical to SEQ ID NO: 5302

SEQ ID NO: 44699 - DNA, 33 bp, Homo Sapiens; identical to SEQ ID NO: 5303

SEQ ID NO: 44700 - DNA, 34 bp, Homo Sapiens; identical to SEQ ID NO: 5304

SEQ ID NO: 44701 - DNA, 35 bp, Homo Sapiens; identical to SEQ ID NO: 5305

SEQ ID NO: 44702 - DNA, 36 bp, Homo Sapiens; identical to SEQ ID NO: 5306

SEQ ID NO: 44703 - DNA, 37 bp, Homo Sapiens; identical to SEQ ID NO: 5307

SEQ ID NO: 44704 - DNA, 38 bp, Homo Sapiens; identical to SEQ ID NO: 5308

SEQ ID NO: 44705 - DNA, 39 bp, Homo Sapiens; identical to SEQ ID NO: 5309

SEQ ID NO: 44706 - DNA, 40 bp, Homo Sapiens; identical to SEQ ID NO: 5310

SEQ ID NO: 44707 - DNA, 41 bp, Homo Sapiens; identical to SEQ ID NO: 5311

SEQ ID NO: 44708 - DNA, 42 bp, Homo Sapiens; identical to SEQ ID NO: 5312

SEQ ID NO: 44709 - DNA, 43 bp, Homo Sapiens; identical to SEQ ID NO: 5313

SEQ ID NO: 44710 - DNA, 44 bp, Homo Sapiens; identical to SEQ ID NO: 5314

SEQ ID NO: 44711 - DNA, 45 bp, Homo Sapiens; identical to SEQ ID NO: 5315

SEQ ID NO: 44712 - DNA, 46 bp, Homo Sapiens; identical to SEQ ID NO: 5316

SEQ ID NO: 44713 - DNA, 47 bp, Homo Sapiens; identical to SEQ ID NO: 5317

SEQ ID NO: 44714 - DNA, 20 bp, Homo Sapiens
agtaggcagcgcgtcagtct

SEQ ID NO: 44715 - DNA, 19 bp, Homo Sapiens
agtaggtagcgcatcagtc

SEQ ID NO: 44716 - DNA, 20 bp, Homo Sapiens
agtaggtagcgcgtcagtct

SEQ ID NO: 44717 - DNA, 17 bp, Homo Sapiens
agtagtcgtggccgagt

SEQ ID NO: 44718 - DNA, 16 bp, Homo Sapiens
agtatccccgcctgtc

SEQ ID NO: 44719 - DNA, 18 bp, Homo Sapiens
agtatccccgcctgtcac

SEQ ID NO: 44720 - DNA, 19 bp, Homo Sapiens
agtcacggtggccgagtgg

SEQ ID NO: 44721 - DNA, 16 bp, Homo Sapiens
agtcacgtcggggtca

SEQ ID NO: 44722 - DNA, 18 bp, Homo Sapiens
agtcacgtcggggtcacc

SEQ ID NO: 44723 - DNA, 19 bp, Homo Sapiens
agtcacgtcggggtcacca

SEQ ID NO: 44724 - DNA, 17 bp, Homo Sapiens
agtcaggatggccgagc

SEQ ID NO: 44725 - DNA, 21 bp, Homo Sapiens
agtcatggaggccatggggtt

SEQ ID NO: 44726 - DNA, 23 bp, Homo Sapiens
agtcatttcgatggcgtgggttc

SEQ ID NO: 44727 - DNA, 18 bp, Homo Sapiens
agtcccacctggggtacc

SEQ ID NO: 44728 - DNA, 18 bp, Homo Sapiens
agtcccacctggggtgcc

SEQ ID NO: 44729 - DNA, 18 bp, Homo Sapiens
agtcccattggtctagcc

SEQ ID NO: 44730 - DNA, 19 bp, Homo Sapiens
agtcccattggtctagcca

SEQ ID NO: 44731 - DNA, 17 bp, Homo Sapiens
agtcccggcggagtcgc

SEQ ID NO: 44732 - DNA, 18 bp, Homo Sapiens
agtcccggcggagtcgcc

SEQ ID NO: 44733 - DNA, 16 bp, Homo Sapiens
agtccctgttcgggcg

SEQ ID NO: 44734 - DNA, 17 bp, Homo Sapiens
agtccctgttcgggcgc

SEQ ID NO: 44735 - DNA, 18 bp, Homo Sapiens
agtccctgttcgggcgcc

SEQ ID NO: 44736 - DNA, 19 bp, Homo Sapiens
agtccctgttcgggcgcca

SEQ ID NO: 44737 - DNA, 18 bp, Homo Sapiens
agtccgtgcgagaatacc

SEQ ID NO: 44738 - DNA, 19 bp, Homo Sapiens
agtccgtgcgagaatacca

SEQ ID NO: 44739 - DNA, 18 bp, Homo Sapiens
agtcctgccgcggtcgcc

SEQ ID NO: 44740 - DNA, 16 bp, Homo Sapiens
agtcggtagagcatca

SEQ ID NO: 44741 - DNA, 18 bp, Homo Sapiens
agtcggtagagcatcaga

SEQ ID NO: 44742 - DNA, 19 bp, Homo Sapiens
agtcggtagagcatcagac

SEQ ID NO: 44743 - DNA, 20 bp, Homo Sapiens
agtcggtagagcatcagact

SEQ ID NO: 44744 - DNA, 18 bp, Homo Sapiens
agtcggtagagcatgaga

SEQ ID NO: 44745 - DNA, 19 bp, Homo Sapiens
agtcggtagagcatgagac

SEQ ID NO: 44746 - DNA, 20 bp, Homo Sapiens
agtcggtagagcatgagacc

SEQ ID NO: 44747 - DNA, 20 bp, Homo Sapiens
agtcggtagagcatgagact

SEQ ID NO: 44748 - DNA, 21 bp, Homo Sapiens
agtcggtagagcatgagactc

SEQ ID NO: 44749 - DNA, 22 bp, Homo Sapiens
agtcggtagagcatgagactct

SEQ ID NO: 44750 - DNA, 24 bp, Homo Sapiens
agtcggtagagcatgagactctta

SEQ ID NO: 44751 - DNA, 27 bp, Homo Sapiens
agtcggtagagcatgagactcttaatc

SEQ ID NO: 44752 - DNA, 28 bp, Homo Sapiens
agtcggtagagcatgagactcttaatct

SEQ ID NO: 44753 - DNA, 29 bp, Homo Sapiens
agtcggtagagcatgagactcttaatctc

SEQ ID NO: 44754 - DNA, 30 bp, Homo Sapiens; identical to SEQ ID NO: 5417

SEQ ID NO: 44755 - DNA, 39 bp, Homo Sapiens; identical to SEQ ID NO: 5421

SEQ ID NO: 44756 - DNA, 16 bp, Homo Sapiens
agtcggtagagcatgg

SEQ ID NO: 44757 - DNA, 17 bp, Homo Sapiens
agtcggtagagcatggg

SEQ ID NO: 44758 - DNA, 18 bp, Homo Sapiens
agtcggtagagcatggga

SEQ ID NO: 44759 - DNA, 19 bp, Homo Sapiens
agtcggtagagcatgggac

SEQ ID NO: 44760 - DNA, 20 bp, Homo Sapiens
agtcggtagagcatgggact

SEQ ID NO: 44761 - DNA, 21 bp, Homo Sapiens
agtcggtagagcatgggactc

SEQ ID NO: 44762 - DNA, 22 bp, Homo Sapiens
agtcggtagagcatgggactct

SEQ ID NO: 44763 - DNA, 24 bp, Homo Sapiens
agtcggtagagcatgggactctta

SEQ ID NO: 44764 - DNA, 25 bp, Homo Sapiens
agtcggtagagcatgggactcttaa

SEQ ID NO: 44765 - DNA, 26 bp, Homo Sapiens
agtcggtagagcatgggactcttaat

SEQ ID NO: 44766 - DNA, 27 bp, Homo Sapiens
agtcggtagagcatgggactcttaatc

SEQ ID NO: 44767 - DNA, 28 bp, Homo Sapiens
agtcggtagagcatgggactcttaatcc

SEQ ID NO: 44768 - DNA, 29 bp, Homo Sapiens
agtcggtagagcatgggactcttaatccc

SEQ ID NO: 44769 - DNA, 39 bp, Homo Sapiens; identical to SEQ ID NO: 5444

SEQ ID NO: 44770 - DNA, 43 bp, Homo Sapiens
agtcggtagagcatgggactcttaatcccagggtcgtgggttc

SEQ ID NO: 44771 - DNA, 22 bp, Homo Sapiens
agtctcataatctgaaggtcct

SEQ ID NO: 44772 - DNA, 23 bp, Homo Sapiens
agtctcataatctgaaggtcgtg

SEQ ID NO: 44773 - DNA, 26 bp, Homo Sapiens
agtctcataatctgaaggtcgtgagt

SEQ ID NO: 44774 - DNA, 21 bp, Homo Sapiens
agtctcttcgggggcgtgggt

SEQ ID NO: 44775 - DNA, 16 bp, Homo Sapiens
agtgaagcattggact

SEQ ID NO: 44776 - DNA, 18 bp, Homo Sapiens
agtggcgcagcggaagcg

SEQ ID NO: 44777 - DNA, 26 bp, Homo Sapiens
agtggcgcagcggaagcgtgctgggc

SEQ ID NO: 44778 - DNA, 28 bp, Homo Sapiens
agtggcgcagcggaagcgtgctgggccc

SEQ ID NO: 44779 - DNA, 16 bp, Homo Sapiens
agtggtagaattctcg

SEQ ID NO: 44780 - DNA, 17 bp, Homo Sapiens
agtggtagaattctcgc

SEQ ID NO: 44781 - DNA, 18 bp, Homo Sapiens
agtggtagaattctcgcc

SEQ ID NO: 44782 - DNA, 19 bp, Homo Sapiens
agtggtagaattctcgcct

SEQ ID NO: 44783 - DNA, 20 bp, Homo Sapiens
agtggtagaattctcgcctg

SEQ ID NO: 44784 - DNA, 21 bp, Homo Sapiens
agtggtagaattctcgcctgc

SEQ ID NO: 44785 - DNA, 22 bp, Homo Sapiens
agtggtagaattctcgcctgcc

SEQ ID NO: 44786 - DNA, 23 bp, Homo Sapiens
agtggtagaattctcgcctgcca

SEQ ID NO: 44787 - DNA, 24 bp, Homo Sapiens
agtggtagaattctcgcctgccac

SEQ ID NO: 44788 - DNA, 25 bp, Homo Sapiens
agtggtagaattctcgcctgccacg

SEQ ID NO: 44789 - DNA, 30 bp, Homo Sapiens; identical to SEQ ID NO: 5546

SEQ ID NO: 44790 - DNA, 35 bp, Homo Sapiens; identical to SEQ ID NO: 5548

SEQ ID NO: 44791 - DNA, 39 bp, Homo Sapiens; identical to SEQ ID NO: 5552

SEQ ID NO: 44792 - DNA, 17 bp, Homo Sapiens
agtggtagagcatttga

SEQ ID NO: 44793 - DNA, 18 bp, Homo Sapiens
agtggtagagcatttgac

SEQ ID NO: 44794 - DNA, 19 bp, Homo Sapiens
agtggtagagcatttgact

SEQ ID NO: 44795 - DNA, 20 bp, Homo Sapiens
agtggtagagcatttgactg

SEQ ID NO: 44796 - DNA, 21 bp, Homo Sapiens
agtggtagagcatttgactgc

SEQ ID NO: 44797 - DNA, 29 bp, Homo Sapiens
agtggtagagcatttgactgcagatcaag

SEQ ID NO: 44798 - DNA, 18 bp, Homo Sapiens
agtggtagagcgcatgct

SEQ ID NO: 44799 - DNA, 17 bp, Homo Sapiens
agtggtagagcgcgtgc

SEQ ID NO: 44800 - DNA, 18 bp, Homo Sapiens
agtggtagagcgcgtgct

SEQ ID NO: 44801 - DNA, 16 bp, Homo Sapiens
agtggtatcatgcaag

SEQ ID NO: 44802 - DNA, 17 bp, Homo Sapiens
agtggtatcatgcaaga

SEQ ID NO: 44803 - DNA, 18 bp, Homo Sapiens
agtggtatcatgcaagat

SEQ ID NO: 44804 - DNA, 19 bp, Homo Sapiens
agtggtatcatgcaagatt

SEQ ID NO: 44805 - DNA, 20 bp, Homo Sapiens
agtggtatcatgcaagattc

SEQ ID NO: 44806 - DNA, 18 bp, Homo Sapiens
agtggtgagtatccccgc

SEQ ID NO: 44807 - DNA, 25 bp, Homo Sapiens
agtggtgagtatccccgcctgtcac

SEQ ID NO: 44808 - DNA, 17 bp, Homo Sapiens
agtggttaggattcggc

SEQ ID NO: 44809 - DNA, 18 bp, Homo Sapiens
agtggttaggattcggcg

SEQ ID NO: 44810 - DNA, 19 bp, Homo Sapiens
agtggttaggattcggcgc

SEQ ID NO: 44811 - DNA, 20 bp, Homo Sapiens
agtggttaggattcggcgct

SEQ ID NO: 44812 - DNA, 21 bp, Homo Sapiens
agtggttaggattcggcgctc

SEQ ID NO: 44813 - DNA, 25 bp, Homo Sapiens
agtggttaggattcggcgctctcac

SEQ ID NO: 44814 - DNA, 26 bp, Homo Sapiens
agtggttaggattcggcgctctcacc

SEQ ID NO: 44815 - DNA, 29 bp, Homo Sapiens
agtggttaggattcggcgctctcaccgcc

SEQ ID NO: 44816 - DNA, 36 bp, Homo Sapiens; identical to SEQ ID NO: 5616

SEQ ID NO: 44817 - DNA, 40 bp, Homo Sapiens; identical to SEQ ID NO: 5620

SEQ ID NO: 44818 - DNA, 17 bp, Homo Sapiens
agtggttagtactctgc

SEQ ID NO: 44819 - DNA, 18 bp, Homo Sapiens
agtggttagtactctgcg

SEQ ID NO: 44820 - DNA, 19 bp, Homo Sapiens
agtggttagtactctgcgt

SEQ ID NO: 44821 - DNA, 20 bp, Homo Sapiens
agtggttagtactctgcgtt

SEQ ID NO: 44822 - DNA, 22 bp, Homo Sapiens
agtggttagtactctgcgttgt

SEQ ID NO: 44823 - DNA, 31 bp, Homo Sapiens
agtggttagtactctgcgttgtggccgcagc

SEQ ID NO: 44824 - DNA, 35 bp, Homo Sapiens; identical to SEQ ID NO: 5634

SEQ ID NO: 44825 - DNA, 36 bp, Homo Sapiens; identical to SEQ ID NO: 5635

SEQ ID NO: 44826 - DNA, 18 bp, Homo Sapiens
agtggttatcacgtctgc

SEQ ID NO: 44827 - DNA, 18 bp, Homo Sapiens
agtggttatcacgttcgc

SEQ ID NO: 44828 - DNA, 19 bp, Homo Sapiens
agtggttatcacgttcgcc

SEQ ID NO: 44829 - DNA, 20 bp, Homo Sapiens
agtggttatcacgttcgcct

SEQ ID NO: 44830 - DNA, 21 bp, Homo Sapiens
agtggttatcacgttcgcctc

SEQ ID NO: 44831 - DNA, 27 bp, Homo Sapiens
agtggttatcacgttcgcctcacacgc

SEQ ID NO: 44832 - DNA, 25 bp, Homo Sapiens
agtgtagtggtcatcacgttcgcct

SEQ ID NO: 44833 - DNA, 23 bp, Homo Sapiens
agtgtagtggttatcacgtctgc

SEQ ID NO: 44834 - DNA, 24 bp, Homo Sapiens
agtgtagtggttatcacgttcgcc

SEQ ID NO: 44835 - DNA, 25 bp, Homo Sapiens
agtgtagtggttatcacgttcgcct

SEQ ID NO: 44836 - DNA, 33 bp, Homo Sapiens; identical to SEQ ID NO: 5677

SEQ ID NO: 44837 - DNA, 34 bp, Homo Sapiens; identical to SEQ ID NO: 5678

SEQ ID NO: 44838 - DNA, 35 bp, Homo Sapiens; identical to SEQ ID NO: 5679

SEQ ID NO: 44839 - DNA, 18 bp, Homo Sapiens
agttaaagactttttctc

SEQ ID NO: 44840 - DNA, 19 bp, Homo Sapiens
agttaaagactttttctct

SEQ ID NO: 44841 - DNA, 21 bp, Homo Sapiens
agttaaagactttttctctga

SEQ ID NO: 44842 - DNA, 22 bp, Homo Sapiens
agttaaagactttttctctgac

SEQ ID NO: 44843 - DNA, 23 bp, Homo Sapiens
agttaaagactttttctctgacc

SEQ ID NO: 44844 - DNA, 24 bp, Homo Sapiens
agttaaagactttttctctgacca

SEQ ID NO: 44845 - DNA, 20 bp, Homo Sapiens
agttaaagattaagagaacc

SEQ ID NO: 44846 - DNA, 26 bp, Homo Sapiens
agttaaagattaagagaaccaacacc

SEQ ID NO: 44847 - DNA, 23 bp, Homo Sapiens
agttcaaatctcgctggggcctc

SEQ ID NO: 44848 - DNA, 24 bp, Homo Sapiens
agttcaaatctcgctggggcctcc

SEQ ID NO: 44849 - DNA, 22 bp, Homo Sapiens
agttcaaatctcggtggaacct

SEQ ID NO: 44850 - DNA, 23 bp, Homo Sapiens
agttcaaatctcggtggaacctc

SEQ ID NO: 44851 - DNA, 24 bp, Homo Sapiens
agttcaaatctcggtggaacctcc

SEQ ID NO: 44852 - DNA, 25 bp, Homo Sapiens
agttcaaatctcggtggaacctcca

SEQ ID NO: 44853 - DNA, 23 bp, Homo Sapiens
agttcaaatctcggtgggacctc

SEQ ID NO: 44854 - DNA, 24 bp, Homo Sapiens
agttcaaatctcggtgggacctcc

SEQ ID NO: 44855 - DNA, 24 bp, Homo Sapiens
agttcgaacctcagagggggcacc

SEQ ID NO: 44856 - DNA, 25 bp, Homo Sapiens
agttcgaacctcagagggggcacca

SEQ ID NO: 44857 - DNA, 24 bp, Homo Sapiens
agttcgagcctcacctggagcacc

SEQ ID NO: 44858 - DNA, 16 bp, Homo Sapiens
agttctggtctccgga

SEQ ID NO: 44859 - DNA, 20 bp, Homo Sapiens
agttctggtctccggatgga

SEQ ID NO: 44860 - DNA, 22 bp, Homo Sapiens
agttctggtctccggatggagg

SEQ ID NO: 44861 - DNA, 44 bp, Homo Sapiens; identical to SEQ ID NO: 5810

SEQ ID NO: 44862 - DNA, 21 bp, Homo Sapiens
agttgcaatacttaatttctg

SEQ ID NO: 44863 - DNA, 24 bp, Homo Sapiens
agttgcaatacttaatttctgcca

SEQ ID NO: 44864 - DNA, 22 bp, Homo Sapiens
agttgggagagcgttagactga

SEQ ID NO: 44865 - DNA, 23 bp, Homo Sapiens
agttgggagagcgttagactgaa

SEQ ID NO: 44866 - DNA, 27 bp, Homo Sapiens
agttgggagagcgttagactgaagatc

SEQ ID NO: 44867 - DNA, 28 bp, Homo Sapiens
agttgggagagcgttagactgaagatct

SEQ ID NO: 44868 - DNA, 30 bp, Homo Sapiens
agttgggagagcgttagactgaagatctaa

SEQ ID NO: 44869 - DNA, 31 bp, Homo Sapiens; identical to SEQ ID NO: 33050

SEQ ID NO: 44870 - DNA, 19 bp, Homo Sapiens
agttggtagagcggaggac

SEQ ID NO: 44871 - DNA, 24 bp, Homo Sapiens
agttggtagagcggaggactgtag

SEQ ID NO: 44872 - DNA, 25 bp, Homo Sapiens
agttggtagagcggaggactgtaga

SEQ ID NO: 44873 - DNA, 34 bp, Homo Sapiens; identical to SEQ ID NO: 5860

SEQ ID NO: 44874 - DNA, 20 bp, Homo Sapiens
ataacagctatccattggtc

SEQ ID NO: 44875 - DNA, 18 bp, Homo Sapiens
ataacccagaggtcgatg

SEQ ID NO: 44876 - DNA, 20 bp, Homo Sapiens
ataacccagaggtcgatgga

SEQ ID NO: 44877 - DNA, 21 bp, Homo Sapiens
ataacccagaggtcgatggat

SEQ ID NO: 44878 - DNA, 22 bp, Homo Sapiens
ataacccagaggtcgatggatc

SEQ ID NO: 44879 - DNA, 23 bp, Homo Sapiens
ataacccagaggtcgatggatcg

SEQ ID NO: 44880 - DNA, 27 bp, Homo Sapiens
ataacccagaggtcgatggatcgaaac

SEQ ID NO: 44881 - DNA, 41 bp, Homo Sapiens; identical to SEQ ID NO: 5913

SEQ ID NO: 44882 - DNA, 29 bp, Homo Sapiens
ataactttgtcaaagttaaattataggct

SEQ ID NO: 44883 - DNA, 22 bp, Homo Sapiens
ataagctatcgggcccataccc

SEQ ID NO: 44884 - DNA, 26 bp, Homo Sapiens
ataagctatcgggcccataccccgaa

SEQ ID NO: 44885 - DNA, 32 bp, Homo Sapiens; identical to SEQ ID NO: 33063

SEQ ID NO: 44886 - DNA, 18 bp, Homo Sapiens
ataataggagcttaaacc

SEQ ID NO: 44887 - DNA, 19 bp, Homo Sapiens
ataataggagcttaaaccc

SEQ ID NO: 44888 - DNA, 20 bp, Homo Sapiens
ataatctgaaggtcctgagt

SEQ ID NO: 44889 - DNA, 40 bp, Homo Sapiens; identical to SEQ ID NO: 5966

SEQ ID NO: 44890 - DNA, 41 bp, Homo Sapiens; identical to SEQ ID NO: 5967

SEQ ID NO: 44891 - DNA, 38 bp, Homo Sapiens
ataatctgaaggtcgtgagttcgagcctcacacggggc

SEQ ID NO: 44892 - DNA, 41 bp, Homo Sapiens; identical to SEQ ID NO: 5976

SEQ ID NO: 44893 - DNA, 42 bp, Homo Sapiens; identical to SEQ ID NO: 5977

SEQ ID NO: 44894 - DNA, 41 bp, Homo Sapiens; identical to SEQ ID NO: 5979

SEQ ID NO: 44895 - DNA, 16 bp, Homo Sapiens
ataatgccgaggttgt

SEQ ID NO: 44896 - DNA, 17 bp, Homo Sapiens
ataatgccgaggttgtg

SEQ ID NO: 44897 - DNA, 22 bp, Homo Sapiens
ataatgccgaggttgtgagttc

SEQ ID NO: 44898 - DNA, 41 bp, Homo Sapiens; identical to SEQ ID NO: 5988

SEQ ID NO: 44899 - DNA, 39 bp, Homo Sapiens; identical to SEQ ID NO: 5998

SEQ ID NO: 44900 - DNA, 42 bp, Homo Sapiens; identical to SEQ ID NO: 6000

SEQ ID NO: 44901 - DNA, 40 bp, Homo Sapiens; identical to SEQ ID NO: 6036

SEQ ID NO: 44902 - DNA, 19 bp, Homo Sapiens
atacccttcccgtactacc

SEQ ID NO: 44903 - DNA, 20 bp, Homo Sapiens
atacccttcccgtactacca

SEQ ID NO: 44904 - DNA, 16 bp, Homo Sapiens
atacttaatttctgcc

SEQ ID NO: 44905 - DNA, 17 bp, Homo Sapiens
atacttaatttctgcca

SEQ ID NO: 44906 - DNA, 32 bp, Homo Sapiens; identical to SEQ ID NO: 6057

SEQ ID NO: 44907 - DNA, 33 bp, Homo Sapiens; identical to SEQ ID NO: 6058

SEQ ID NO: 44908 - DNA, 17 bp, Homo Sapiens
atagctcagtcggtaga

SEQ ID NO: 44909 - DNA, 18 bp, Homo Sapiens
atagctcagtcggtagag

SEQ ID NO: 44910 - DNA, 26 bp, Homo Sapiens
atagctcagtcggtagagcatcagac

SEQ ID NO: 44911 - DNA, 27 bp, Homo Sapiens
atagctcagtcggtagagcatcagact

SEQ ID NO: 44912 - DNA, 16 bp, Homo Sapiens
ataggagcttaaaccc

SEQ ID NO: 44913 - DNA, 30 bp, Homo Sapiens; identical to SEQ ID NO: 6115

SEQ ID NO: 44914 - DNA, 31 bp, Homo Sapiens
ataggatggggtgtgataggtggcacggaga

SEQ ID NO: 44915 - DNA, 32 bp, Homo Sapiens
ataggatggggtgtgataggtggcacggagaa

SEQ ID NO: 44916 - DNA, 33 bp, Homo Sapiens
ataggatggggtgtgataggtggcacggagaat

SEQ ID NO: 44917 - DNA, 34 bp, Homo Sapiens
ataggatggggtgtgataggtggcacggagaatt

SEQ ID NO: 44918 - DNA, 37 bp, Homo Sapiens
ataggatggggtgtgataggtggcacggagaattttg

SEQ ID NO: 44919 - DNA, 22 bp, Homo Sapiens
atagtggtgagtatccccgcct

SEQ ID NO: 44920 - DNA, 19 bp, Homo Sapiens
atagtggttagtactctgc

SEQ ID NO: 44921 - DNA, 20 bp, Homo Sapiens
atagtggttagtactctgcg

SEQ ID NO: 44922 - DNA, 21 bp, Homo Sapiens
atagtggttagtactctgcgt

SEQ ID NO: 44923 - DNA, 22 bp, Homo Sapiens
atagtggttagtactctgcgtt

SEQ ID NO: 44924 - DNA, 23 bp, Homo Sapiens
atagtggttagtactctgcgttg

SEQ ID NO: 44925 - DNA, 24 bp, Homo Sapiens
atagtggttagtactctgcgttgt

SEQ ID NO: 44926 - DNA, 38 bp, Homo Sapiens; identical to SEQ ID NO: 6160

SEQ ID NO: 44927 - DNA, 24 bp, Homo Sapiens
atagtgtagtggttatcacatctg

SEQ ID NO: 44928 - DNA, 28 bp, Homo Sapiens
atagtgtagtggttatcacgtctgcttt

SEQ ID NO: 44929 - DNA, 25 bp, Homo Sapiens
atatcattggtcgtggttgtagtcc

SEQ ID NO: 44930 - DNA, 30 bp, Homo Sapiens; identical to SEQ ID NO: 6208

SEQ ID NO: 44931 - DNA, 31 bp, Homo Sapiens; identical to SEQ ID NO: 6209

SEQ ID NO: 44932 - DNA, 32 bp, Homo Sapiens; identical to SEQ ID NO: 6210

SEQ ID NO: 44933 - DNA, 33 bp, Homo Sapiens; identical to SEQ ID NO: 6211

SEQ ID NO: 44934 - DNA, 34 bp, Homo Sapiens; identical to SEQ ID NO: 6212

SEQ ID NO: 44935 - DNA, 35 bp, Homo Sapiens; identical to SEQ ID NO: 6213

SEQ ID NO: 44936 - DNA, 36 bp, Homo Sapiens; identical to SEQ ID NO: 6214

SEQ ID NO: 44937 - DNA, 38 bp, Homo Sapiens; identical to SEQ ID NO: 6216

SEQ ID NO: 44938 - DNA, 39 bp, Homo Sapiens; identical to SEQ ID NO: 6217

SEQ ID NO: 44939 - DNA, 25 bp, Homo Sapiens
atatggtctagcggttaggattcct

SEQ ID NO: 44940 - DNA, 29 bp, Homo Sapiens
atatggtctagcggttaggattcctggtt

SEQ ID NO: 44941 - DNA, 32 bp, Homo Sapiens; identical to SEQ ID NO: 6228

SEQ ID NO: 44942 - DNA, 16 bp, Homo Sapiens
atatgtccgcgtgggt

SEQ ID NO: 44943 - DNA, 37 bp, Homo Sapiens; identical to SEQ ID NO: 6241

SEQ ID NO: 44944 - DNA, 47 bp, Homo Sapiens; identical to SEQ ID NO: 6257

SEQ ID NO: 44945 - DNA, 38 bp, Homo Sapiens; identical to SEQ ID NO: 6261

SEQ ID NO: 44946 - DNA, 17 bp, Homo Sapiens
atcaccccataaacacc

SEQ ID NO: 44947 - DNA, 16 bp, Homo Sapiens
atcacgtcggggtcac

SEQ ID NO: 44948 - DNA, 17 bp, Homo Sapiens
atcacgtcggggtcacc

SEQ ID NO: 44949 - DNA, 18 bp, Homo Sapiens
atcacgtcggggtcacca

SEQ ID NO: 44950 - DNA, 19 bp, Homo Sapiens
atcacgttcgcctcacacg

SEQ ID NO: 44951 - DNA, 38 bp, Homo Sapiens; identical to SEQ ID NO: 6289

SEQ ID NO: 44952 - DNA, 39 bp, Homo Sapiens; identical to SEQ ID NO: 6290

SEQ ID NO: 44953 - DNA, 35 bp, Homo Sapiens; identical to SEQ ID NO: 6298

SEQ ID NO: 44954 - DNA, 38 bp, Homo Sapiens; identical to SEQ ID NO: 6301

SEQ ID NO: 44955 - DNA, 38 bp, Homo Sapiens; identical to SEQ ID NO: 6310

SEQ ID NO: 44956 - DNA, 37 bp, Homo Sapiens; identical to SEQ ID NO: 6316

SEQ ID NO: 44957 - DNA, 38 bp, Homo Sapiens; identical to SEQ ID NO: 6317

SEQ ID NO: 44958 - DNA, 38 bp, Homo Sapiens; identical to SEQ ID NO: 6326

SEQ ID NO: 44959 - DNA, 35 bp, Homo Sapiens; identical to SEQ ID NO: 6333

SEQ ID NO: 44960 - DNA, 37 bp, Homo Sapiens; identical to SEQ ID NO: 6335

SEQ ID NO: 44961 - DNA, 38 bp, Homo Sapiens; identical to SEQ ID NO: 6336

SEQ ID NO: 44962 - DNA, 34 bp, Homo Sapiens
atcagaaggttgcgtgttcaaatcacgtcggggt

SEQ ID NO: 44963 - DNA, 35 bp, Homo Sapiens; identical to SEQ ID NO: 6343

SEQ ID NO: 44964 - DNA, 35 bp, Homo Sapiens; identical to SEQ ID NO: 6351

SEQ ID NO: 44965 - DNA, 36 bp, Homo Sapiens; identical to SEQ ID NO: 6352

SEQ ID NO: 44966 - DNA, 38 bp, Homo Sapiens; identical to SEQ ID NO: 6354

SEQ ID NO: 44967 - DNA, 28 bp, Homo Sapiens
atcattggtcgtggttgtagtccgtgcg

SEQ ID NO: 44968 - DNA, 30 bp, Homo Sapiens; identical to SEQ ID NO: 6404

SEQ ID NO: 44969 - DNA, 31 bp, Homo Sapiens; identical to SEQ ID NO: 6405

SEQ ID NO: 44970 - DNA, 32 bp, Homo Sapiens; identical to SEQ ID NO: 6406

SEQ ID NO: 44971 - DNA, 33 bp, Homo Sapiens; identical to SEQ ID NO: 6407

SEQ ID NO: 44972 - DNA, 34 bp, Homo Sapiens; identical to SEQ ID NO: 6408

SEQ ID NO: 44973 - DNA, 36 bp, Homo Sapiens; identical to SEQ ID NO: 6410

SEQ ID NO: 44974 - DNA, 37 bp, Homo Sapiens; identical to SEQ ID NO: 6411

SEQ ID NO: 44975 - DNA, 18 bp, Homo Sapiens
atccagcgatccgagttc

SEQ ID NO: 44976 - DNA, 36 bp, Homo Sapiens; identical to SEQ ID NO: 6429

SEQ ID NO: 44977 - DNA, 20 bp, Homo Sapiens
atccattggggtctccccgc

SEQ ID NO: 44978 - DNA, 47 bp, Homo Sapiens; identical to SEQ ID NO: 6455

SEQ ID NO: 44979 - DNA, 18 bp, Homo Sapiens
atccattggtcttaggcc

SEQ ID NO: 44980 - DNA, 19 bp, Homo Sapiens
atccattggtcttaggccc

SEQ ID NO: 44981 - DNA, 47 bp, Homo Sapiens; identical to SEQ ID NO: 6484

SEQ ID NO: 44982 - DNA, 17 bp, Homo Sapiens
atcccaccactgccacc

SEQ ID NO: 44983 - DNA, 18 bp, Homo Sapiens
atcccaccactgccacca

SEQ ID NO: 44984 - DNA, 17 bp, Homo Sapiens
atcccaccagagtcgcc

SEQ ID NO: 44985 - DNA, 17 bp, Homo Sapiens
atcccaccctcgtcgcc

SEQ ID NO: 44986 - DNA, 18 bp, Homo Sapiens
atcccaccctcgtcgcca

SEQ ID NO: 44987 - DNA, 16 bp, Homo Sapiens
atcccaccgctgccac

SEQ ID NO: 44988 - DNA, 17 bp, Homo Sapiens
atcccaccgctgccacc

SEQ ID NO: 44989 - DNA, 18 bp, Homo Sapiens
atcccaccgctgccacca

SEQ ID NO: 44990 - DNA, 17 bp, Homo Sapiens
atcccaccttcgtcgcc

SEQ ID NO: 44991 - DNA, 16 bp, Homo Sapiens
atcccactcctgacac

SEQ ID NO: 44992 - DNA, 17 bp, Homo Sapiens
atcccactcctgacacc

SEQ ID NO: 44993 - DNA, 18 bp, Homo Sapiens
atcccactcctgacacca

SEQ ID NO: 44994 - DNA, 16 bp, Homo Sapiens
atcccacttctgacac

SEQ ID NO: 44995 - DNA, 17 bp, Homo Sapiens
atcccacttctgacacc

SEQ ID NO: 44996 - DNA, 18 bp, Homo Sapiens
atcccacttctgacacca

SEQ ID NO: 44997 - DNA, 16 bp, Homo Sapiens
atcccagcggggcctc

SEQ ID NO: 44998 - DNA, 17 bp, Homo Sapiens
atcccagcggggcctcc

SEQ ID NO: 44999 - DNA, 18 bp, Homo Sapiens
atcccagcggggcctcca

SEQ ID NO: 45000 - DNA, 16 bp, Homo Sapiens
atcccagcggtgcctc

SEQ ID NO: 45001 - DNA, 17 bp, Homo Sapiens
atcccagcggtgcctcc

SEQ ID NO: 45002 - DNA, 18 bp, Homo Sapiens
atcccagcggtgcctcca

SEQ ID NO: 45003 - DNA, 16 bp, Homo Sapiens
atcccagtagagcctc

SEQ ID NO: 45004 - DNA, 16 bp, Homo Sapiens
atcccatcctcgtcgc

SEQ ID NO: 45005 - DNA, 17 bp, Homo Sapiens
atcccatcctcgtcgcc

SEQ ID NO: 45006 - DNA, 18 bp, Homo Sapiens
atcccatcctcgtcgcca

SEQ ID NO: 45007 - DNA, 18 bp, Homo Sapiens
atccccagcatctccacc

SEQ ID NO: 45008 - DNA, 38 bp, Homo Sapiens; identical to SEQ ID NO: 33215

SEQ ID NO: 45009 - DNA, 17 bp, Homo Sapiens
atccccggcacctccac

SEQ ID NO: 45010 - DNA, 18 bp, Homo Sapiens
atccccggcacctccacc

SEQ ID NO: 45011 - DNA, 19 bp, Homo Sapiens
atccccggcacctccacca

SEQ ID NO: 45012 - DNA, 17 bp, Homo Sapiens
atccccggcatctccac

SEQ ID NO: 45013 - DNA, 18 bp, Homo Sapiens
atccccggcatctccacc

SEQ ID NO: 45014 - DNA, 19 bp, Homo Sapiens
atccccggcatctccacca

SEQ ID NO: 45015 - DNA, 17 bp, Homo Sapiens
atccccgtacgggccac

SEQ ID NO: 45016 - DNA, 18 bp, Homo Sapiens
atccccgtacgggccacc

SEQ ID NO: 45017 - DNA, 16 bp, Homo Sapiens
atcccggacgagcccc

SEQ ID NO: 45018 - DNA, 17 bp, Homo Sapiens
atcccggacgagccccc

SEQ ID NO: 45019 - DNA, 18 bp, Homo Sapiens
atcccggacgagccccca

SEQ ID NO: 45020 - DNA, 17 bp, Homo Sapiens
atcccgggcggaaacac

SEQ ID NO: 45021 - DNA, 18 bp, Homo Sapiens
atcccgggcggaaacacc

SEQ ID NO: 45022 - DNA, 16 bp, Homo Sapiens
atcccgggtttcggca

SEQ ID NO: 45023 - DNA, 17 bp, Homo Sapiens
atcccgggtttcggcac

SEQ ID NO: 45024 - DNA, 18 bp, Homo Sapiens
atcccgggtttcggcacc

SEQ ID NO: 45025 - DNA, 19 bp, Homo Sapiens
atcccgggtttcggcacca

SEQ ID NO: 45026 - DNA, 16 bp, Homo Sapiens
atcccttcgtggttgc

SEQ ID NO: 45027 - DNA, 16 bp, Homo Sapiens
atccgagtcacggcac

SEQ ID NO: 45028 - DNA, 17 bp, Homo Sapiens
atccgagtcacggcacc

SEQ ID NO: 45029 - DNA, 18 bp, Homo Sapiens
atccgagtcacggcacca

SEQ ID NO: 45030 - DNA, 28 bp, Homo Sapiens
atccgagttcaaatctcggtgggacctc

SEQ ID NO: 45031 - DNA, 16 bp, Homo Sapiens
atccggctcgaaggac

SEQ ID NO: 45032 - DNA, 17 bp, Homo Sapiens
atccggctcgaaggacc

SEQ ID NO: 45033 - DNA, 18 bp, Homo Sapiens
atccggctcgaaggacca

SEQ ID NO: 45034 - DNA, 16 bp, Homo Sapiens
atccggctcggaggac

SEQ ID NO: 45035 - DNA, 17 bp, Homo Sapiens
atccggctcggaggacc

SEQ ID NO: 45036 - DNA, 18 bp, Homo Sapiens
atccggctcggaggacca

SEQ ID NO: 45037 - DNA, 16 bp, Homo Sapiens
atccgggtgccccctc

SEQ ID NO: 45038 - DNA, 17 bp, Homo Sapiens
atccgggtgccccctcc

SEQ ID NO: 45039 - DNA, 18 bp, Homo Sapiens
atccgggtgccccctcca

SEQ ID NO: 45040 - DNA, 19 bp, Homo Sapiens
atcctcacacggggcacca

SEQ ID NO: 45041 - DNA, 18 bp, Homo Sapiens
atcctcacctggagcacc

SEQ ID NO: 45042 - DNA, 19 bp, Homo Sapiens
atcctcacctggagcacca

SEQ ID NO: 45043 - DNA, 16 bp, Homo Sapiens
atcctgccgactacgc

SEQ ID NO: 45044 - DNA, 17 bp, Homo Sapiens
atcctgccgactacgcc

SEQ ID NO: 45045 - DNA, 18 bp, Homo Sapiens
atcctgccgactacgcca

SEQ ID NO: 45046 - DNA, 16 bp, Homo Sapiens
atcctgctcacagcgc

SEQ ID NO: 45047 - DNA, 17 bp, Homo Sapiens
atcctgctcacagcgcc

SEQ ID NO: 45048 - DNA, 18 bp, Homo Sapiens
atcctgctcacagcgcca

SEQ ID NO: 45049 - DNA, 29 bp, Homo Sapiens
atcctgggttcgaatcccagcggggcctc

SEQ ID NO: 45050 - DNA, 17 bp, Homo Sapiens
atcctgtcggctacgcc

SEQ ID NO: 45051 - DNA, 18 bp, Homo Sapiens
atcctgtcggctacgcca

SEQ ID NO: 45052 - DNA, 16 bp, Homo Sapiens
atcctgttcgtgacgc

SEQ ID NO: 45053 - DNA, 17 bp, Homo Sapiens
atcctgttcgtgacgcc

SEQ ID NO: 45054 - DNA, 18 bp, Homo Sapiens
atcctgttcgtgacgcca

SEQ ID NO: 45055 - DNA, 22 bp, Homo Sapiens
atcgaaaccatcctctgctacc

SEQ ID NO: 45056 - DNA, 23 bp, Homo Sapiens
atcgaaaccatcctctgctacca

SEQ ID NO: 45057 - DNA, 22 bp, Homo Sapiens
atcgtatagtggttagtactct

SEQ ID NO: 45058 - DNA, 24 bp, Homo Sapiens
atcgtatagtggttagtactctgc

SEQ ID NO: 45059 - DNA, 25 bp, Homo Sapiens
atcgtatagtggttagtactctgcg

SEQ ID NO: 45060 - DNA, 27 bp, Homo Sapiens
atcgtatagtggttagtactctgcgtt

SEQ ID NO: 45061 - DNA, 17 bp, Homo Sapiens
atctaaaggtccctggt

SEQ ID NO: 45062 - DNA, 19 bp, Homo Sapiens
atctaaaggtccctggttc

SEQ ID NO: 45063 - DNA, 38 bp, Homo Sapiens; identical to SEQ ID NO: 6661

SEQ ID NO: 45064 - DNA, 20 bp, Homo Sapiens
atctaaaggtccctggttcg

SEQ ID NO: 45065 - DNA, 21 bp, Homo Sapiens
atctaaaggtccctggttcga

SEQ ID NO: 45066 - DNA, 22 bp, Homo Sapiens
atctaaaggtccctggttcgat

SEQ ID NO: 45067 - DNA, 30 bp, Homo Sapiens; identical to SEQ ID NO: 6669

SEQ ID NO: 45068 - DNA, 34 bp, Homo Sapiens; identical to SEQ ID NO: 6671

SEQ ID NO: 45069 - DNA, 35 bp, Homo Sapiens; identical to SEQ ID NO: 6672

SEQ ID NO: 45070 - DNA, 36 bp, Homo Sapiens; identical to SEQ ID NO: 6673

SEQ ID NO: 45071 - DNA, 37 bp, Homo Sapiens; identical to SEQ ID NO: 6674

SEQ ID NO: 45072 - DNA, 38 bp, Homo Sapiens; identical to SEQ ID NO: 6675

SEQ ID NO: 45073 - DNA, 39 bp, Homo Sapiens; identical to SEQ ID NO: 6676

SEQ ID NO: 45074 - DNA, 37 bp, Homo Sapiens; identical to SEQ ID NO: 6680

SEQ ID NO: 45075 - DNA, 38 bp, Homo Sapiens; identical to SEQ ID NO: 6681

SEQ ID NO: 45076 - DNA, 39 bp, Homo Sapiens; identical to SEQ ID NO: 6682

SEQ ID NO: 45077 - DNA, 16 bp, Homo Sapiens
atctcgctggggcctc

SEQ ID NO: 45078 - DNA, 17 bp, Homo Sapiens
atctcgctggggcctcc

SEQ ID NO: 45079 - DNA, 18 bp, Homo Sapiens
atctcgctggggcctcca

SEQ ID NO: 45080 - DNA, 16 bp, Homo Sapiens
atctcggtggaacctc

SEQ ID NO: 45081 - DNA, 17 bp, Homo Sapiens
atctcggtggaacctcc

SEQ ID NO: 45082 - DNA, 18 bp, Homo Sapiens
atctcggtggaacctcca

SEQ ID NO: 45083 - DNA, 16 bp, Homo Sapiens
atctcggtgggacccc

SEQ ID NO: 45084 - DNA, 16 bp, Homo Sapiens
atctcggtgggacctc

SEQ ID NO: 45085 - DNA, 17 bp, Homo Sapiens
atctcggtgggacctcc

SEQ ID NO: 45086 - DNA, 18 bp, Homo Sapiens
atctcggtgggacctcca

SEQ ID NO: 45087 - DNA, 35 bp, Homo Sapiens; identical to SEQ ID NO: 6701

SEQ ID NO: 45088 - DNA, 37 bp, Homo Sapiens; identical to SEQ ID NO: 6703

SEQ ID NO: 45089 - DNA, 38 bp, Homo Sapiens; identical to SEQ ID NO: 6704

SEQ ID NO: 45090 - DNA, 39 bp, Homo Sapiens; identical to SEQ ID NO: 6705

SEQ ID NO: 45091 - DNA, 37 bp, Homo Sapiens; identical to SEQ ID NO: 6717

SEQ ID NO: 45092 - DNA, 38 bp, Homo Sapiens; identical to SEQ ID NO: 6718

SEQ ID NO: 45093 - DNA, 39 bp, Homo Sapiens; identical to SEQ ID NO: 6719

SEQ ID NO: 45094 - DNA, 37 bp, Homo Sapiens; identical to SEQ ID NO: 6724

SEQ ID NO: 45095 - DNA, 38 bp, Homo Sapiens; identical to SEQ ID NO: 6725

SEQ ID NO: 45096 - DNA, 39 bp, Homo Sapiens; identical to SEQ ID NO: 6726

SEQ ID NO: 45097 - DNA, 37 bp, Homo Sapiens; identical to SEQ ID NO: 6739

SEQ ID NO: 45098 - DNA, 36 bp, Homo Sapiens; identical to SEQ ID NO: 6751

SEQ ID NO: 45099 - DNA, 37 bp, Homo Sapiens; identical to SEQ ID NO: 6752

SEQ ID NO: 45100 - DNA, 38 bp, Homo Sapiens; identical to SEQ ID NO: 6753

SEQ ID NO: 45101 - DNA, 39 bp, Homo Sapiens; identical to SEQ ID NO: 6754

SEQ ID NO: 45102 - DNA, 19 bp, Homo Sapiens
atctgagggtccagggttt

SEQ ID NO: 45103 - DNA, 22 bp, Homo Sapiens
atgaaaacctttttccaaggac

SEQ ID NO: 45104 - DNA, 23 bp, Homo Sapiens
atgaaaacctttttccaaggaca

SEQ ID NO: 45105 - DNA, 24 bp, Homo Sapiens
atgaaaacctttttccaaggacac

SEQ ID NO: 45106 - DNA, 25 bp, Homo Sapiens
atgaaaacctttttccaaggacacc

SEQ ID NO: 45107 - DNA, 26 bp, Homo Sapiens
atgaaaacctttttccaaggacacca

SEQ ID NO: 45108 - DNA, 21 bp, Homo Sapiens
atgaggccccgggttcaatcc

SEQ ID NO: 45109 - DNA, 26 bp, Homo Sapiens
atgaggccccgggttcgatccccggc

SEQ ID NO: 45110 - DNA, 35 bp, Homo Sapiens; identical to SEQ ID NO: 6789

SEQ ID NO: 45111 - DNA, 36 bp, Homo Sapiens; identical to SEQ ID NO: 6790

SEQ ID NO: 45112 - DNA, 35 bp, Homo Sapiens; identical to SEQ ID NO: 6796

SEQ ID NO: 45113 - DNA, 32 bp, Homo Sapiens; identical to SEQ ID NO: 6810

SEQ ID NO: 45114 - DNA, 25 bp, Homo Sapiens
atgcccccatgtctaacaacatggc

SEQ ID NO: 45115 - DNA, 26 bp, Homo Sapiens
atgcccccatgtctaacaacatggct

SEQ ID NO: 45116 - DNA, 27 bp, Homo Sapiens
atgcccccatgtctaacaacatggctt

SEQ ID NO: 45117 - DNA, 19 bp, Homo Sapiens
atgccgaggttgtgagttc

SEQ ID NO: 45118 - DNA, 22 bp, Homo Sapiens
atgccgaggttgtgagttcgag

SEQ ID NO: 45119 - DNA, 21 bp, Homo Sapiens
atgctttgcacgtatgaggcc

SEQ ID NO: 45120 - DNA, 25 bp, Homo Sapiens
atgctttgcacgtatgaggccccgg

SEQ ID NO: 45121 - DNA, 27 bp, Homo Sapiens
atgctttgcacgtatgaggccccgggt

SEQ ID NO: 45122 - DNA, 41 bp, Homo Sapiens
atgctttgcacgtatgaggccccgggttcaatccccggcat

SEQ ID NO: 45123 - DNA, 42 bp, Homo Sapiens
atgctttgcacgtatgaggccccgggttcaatccccggcatc

SEQ ID NO: 45124 - DNA, 43 bp, Homo Sapiens; identical to SEQ ID NO: 33360

SEQ ID NO: 45125 - DNA, 33 bp, Homo Sapiens; identical to SEQ ID NO: 6890

SEQ ID NO: 45126 - DNA, 34 bp, Homo Sapiens; identical to SEQ ID NO: 6891

SEQ ID NO: 45127 - DNA, 35 bp, Homo Sapiens; identical to SEQ ID NO: 6892

SEQ ID NO: 45128 - DNA, 36 bp, Homo Sapiens; identical to SEQ ID NO: 6893

SEQ ID NO: 45129 - DNA, 16 bp, Homo Sapiens
atggataacgcgtctg

SEQ ID NO: 45130 - DNA, 17 bp, Homo Sapiens
atggataacgcgtctga

SEQ ID NO: 45131 - DNA, 19 bp, Homo Sapiens
atggataacgcgtctgact

SEQ ID NO: 45132 - DNA, 17 bp, Homo Sapiens
atggataaggcactggc

SEQ ID NO: 45133 - DNA, 17 bp, Homo Sapiens
atggataaggcatcagc

SEQ ID NO: 45134 - DNA, 19 bp, Homo Sapiens
atggataaggcatcagcct

SEQ ID NO: 45135 - DNA, 20 bp, Homo Sapiens
atggataaggcatcagcctc

SEQ ID NO: 45136 - DNA, 21 bp, Homo Sapiens
atggataaggcatcagcctcc

SEQ ID NO: 45137 - DNA, 28 bp, Homo Sapiens
atggataaggcatcagcctccggagctg

SEQ ID NO: 45138 - DNA, 29 bp, Homo Sapiens
atggataaggcatcagcctccggagctgg

SEQ ID NO: 45139 - DNA, 36 bp, Homo Sapiens; identical to SEQ ID NO: 6910

SEQ ID NO: 45140 - DNA, 17 bp, Homo Sapiens
atggataaggcattggc

SEQ ID NO: 45141 - DNA, 18 bp, Homo Sapiens
atggataaggcattggcc

SEQ ID NO: 45142 - DNA, 19 bp, Homo Sapiens
atggataaggcattggcct

SEQ ID NO: 45143 - DNA, 16 bp, Homo Sapiens
atggataaggcgtctg

SEQ ID NO: 45144 - DNA, 17 bp, Homo Sapiens
atggataaggcgtctga

SEQ ID NO: 45145 - DNA, 19 bp, Homo Sapiens
atggataaggcgtctgact

SEQ ID NO: 45146 - DNA, 26 bp, Homo Sapiens
atggataaggcgtctgacttcggatc

SEQ ID NO: 45147 - DNA, 21 bp, Homo Sapiens
atggataaggcgtctgattcc

SEQ ID NO: 45148 - DNA, 16 bp, Homo Sapiens
atggatagcgcattgg

SEQ ID NO: 45149 - DNA, 17 bp, Homo Sapiens
atggatagcgcattgga

SEQ ID NO: 45150 - DNA, 18 bp, Homo Sapiens
atggatagcgcattggac

SEQ ID NO: 45151 - DNA, 21 bp, Homo Sapiens
atggatagcgcattggacttc

SEQ ID NO: 45152 - DNA, 26 bp, Homo Sapiens
atggatcgaaaccatcctctgctacc

SEQ ID NO: 45153 - DNA, 24 bp, Homo Sapiens
atggccgagcggtctaaggcgctg

SEQ ID NO: 45154 - DNA, 16 bp, Homo Sapiens
atgggactcttaatcc

SEQ ID NO: 45155 - DNA, 27 bp, Homo Sapiens
atggggtgtgataggtggcacggagaa

SEQ ID NO: 45156 - DNA, 32 bp, Homo Sapiens; identical to SEQ ID NO: 6978

SEQ ID NO: 45157 - DNA, 16 bp, Homo Sapiens
atgggtggttcagtgg

SEQ ID NO: 45158 - DNA, 23 bp, Homo Sapiens
atgggtggttcagtggtagaatt

SEQ ID NO: 45159 - DNA, 26 bp, Homo Sapiens
atgggtggttcagtggtagaattctc

SEQ ID NO: 45160 - DNA, 27 bp, Homo Sapiens
atgggtggttcagtggtagaattctcg

SEQ ID NO: 45161 - DNA, 28 bp, Homo Sapiens
atgggtggttcagtggtagaattctcgc

SEQ ID NO: 45162 - DNA, 29 bp, Homo Sapiens
atgggtggttcagtggtagaattctcgcc

SEQ ID NO: 45163 - DNA, 30 bp, Homo Sapiens; identical to SEQ ID NO: 6995

SEQ ID NO: 45164 - DNA, 31 bp, Homo Sapiens; identical to SEQ ID NO: 6996

SEQ ID NO: 45165 - DNA, 32 bp, Homo Sapiens; identical to SEQ ID NO: 6997

SEQ ID NO: 45166 - DNA, 33 bp, Homo Sapiens; identical to SEQ ID NO: 6998

SEQ ID NO: 45167 - DNA, 34 bp, Homo Sapiens; identical to SEQ ID NO: 6999

SEQ ID NO: 45168 - DNA, 25 bp, Homo Sapiens
atgggttcgattctcatagtcctag

SEQ ID NO: 45169 - DNA, 26 bp, Homo Sapiens
atgggttcgattctcatagtcctagc

SEQ ID NO: 45170 - DNA, 17 bp, Homo Sapiens
atggtagaattctcgcc

SEQ ID NO: 45171 - DNA, 16 bp, Homo Sapiens
atggtagagcgctcgc

SEQ ID NO: 45172 - DNA, 17 bp, Homo Sapiens
atggtagagcgctcgct

SEQ ID NO: 45173 - DNA, 20 bp, Homo Sapiens
atggtctagcggttaggatt

SEQ ID NO: 45174 - DNA, 22 bp, Homo Sapiens
atggtctagcggttaggattcc

SEQ ID NO: 45175 - DNA, 23 bp, Homo Sapiens
atggtctagcggttaggattcct

SEQ ID NO: 45176 - DNA, 25 bp, Homo Sapiens
atggtctagcggttaggattcctgg

SEQ ID NO: 45177 - DNA, 27 bp, Homo Sapiens
atggtctagcggttaggattcctggtt

SEQ ID NO: 45178 - DNA, 36 bp, Homo Sapiens; identical to SEQ ID NO: 33422

SEQ ID NO: 45179 - DNA, 30 bp, Homo Sapiens; identical to SEQ ID NO: 7052

SEQ ID NO: 45180 - DNA, 39 bp, Homo Sapiens
atggtgagcactctggactctgaatccagcgatccgagt

SEQ ID NO: 45181 - DNA, 29 bp, Homo Sapiens
atggtggagttaaagactttttctctgac

SEQ ID NO: 45182 - DNA, 30 bp, Homo Sapiens; identical to SEQ ID NO: 7068

SEQ ID NO: 45183 - DNA, 31 bp, Homo Sapiens; identical to SEQ ID NO: 7069

SEQ ID NO: 45184 - DNA, 29 bp, Homo Sapiens
atggtggttcagtggtagaattctcgcct

SEQ ID NO: 45185 - DNA, 25 bp, Homo Sapiens
atggtgtaatggttagcactctgga

SEQ ID NO: 45186 - DNA, 27 bp, Homo Sapiens
atggtgtaatggttagcactctggact

SEQ ID NO: 45187 - DNA, 28 bp, Homo Sapiens
atggtgtaatggttagcactctggactc

SEQ ID NO: 45188 - DNA, 30 bp, Homo Sapiens; identical to SEQ ID NO: 7092

SEQ ID NO: 45189 - DNA, 32 bp, Homo Sapiens; identical to SEQ ID NO: 7094

SEQ ID NO: 45190 - DNA, 47 bp, Homo Sapiens; identical to SEQ ID NO: 33444

SEQ ID NO: 45191 - DNA, 16 bp, Homo Sapiens
atggttagcactctgg

SEQ ID NO: 45192 - DNA, 17 bp, Homo Sapiens
atggttagcactctgga

SEQ ID NO: 45193 - DNA, 18 bp, Homo Sapiens
atggttagcactctggac

SEQ ID NO: 45194 - DNA, 19 bp, Homo Sapiens
atggttagcactctggact

SEQ ID NO: 45195 - DNA, 20 bp, Homo Sapiens
atggttagcactctggactc

SEQ ID NO: 45196 - DNA, 21 bp, Homo Sapiens
atggttagcactctggactct

SEQ ID NO: 45197 - DNA, 22 bp, Homo Sapiens
atggttagcactctggactctg

SEQ ID NO: 45198 - DNA, 23 bp, Homo Sapiens
atggttagcactctggactctga

SEQ ID NO: 45199 - DNA, 24 bp, Homo Sapiens
atggttagcactctggactctgaa

SEQ ID NO: 45200 - DNA, 25 bp, Homo Sapiens
atggttagcactctggactctgaat

SEQ ID NO: 45201 - DNA, 26 bp, Homo Sapiens
atggttagcactctggactctgaatc

SEQ ID NO: 45202 - DNA, 27 bp, Homo Sapiens
atggttagcactctggactctgaatcc

SEQ ID NO: 45203 - DNA, 28 bp, Homo Sapiens
atggttagcactctggactctgaatcca

SEQ ID NO: 45204 - DNA, 30 bp, Homo Sapiens; identical to SEQ ID NO: 7111

SEQ ID NO: 45205 - DNA, 31 bp, Homo Sapiens; identical to SEQ ID NO: 7112

SEQ ID NO: 45206 - DNA, 38 bp, Homo Sapiens; identical to SEQ ID NO: 7116

SEQ ID NO: 45207 - DNA, 39 bp, Homo Sapiens; identical to SEQ ID NO: 7117

SEQ ID NO: 45208 - DNA, 40 bp, Homo Sapiens; identical to SEQ ID NO: 33465

SEQ ID NO: 45209 - DNA, 26 bp, Homo Sapiens
atggttagcactctggactttgaatc

SEQ ID NO: 45210 - DNA, 23 bp, Homo Sapiens
atggtttttcatatcattggtcg

SEQ ID NO: 45211 - DNA, 30 bp, Homo Sapiens; identical to SEQ ID NO: 7138

SEQ ID NO: 45212 - DNA, 33 bp, Homo Sapiens; identical to SEQ ID NO: 7141

SEQ ID NO: 45213 - DNA, 34 bp, Homo Sapiens; identical to SEQ ID NO: 7142

SEQ ID NO: 45214 - DNA, 40 bp, Homo Sapiens; identical to SEQ ID NO: 7148

SEQ ID NO: 45215 - DNA, 41 bp, Homo Sapiens; identical to SEQ ID NO: 7149

SEQ ID NO: 45216 - DNA, 42 bp, Homo Sapiens; identical to SEQ ID NO: 7150

SEQ ID NO: 45217 - DNA, 43 bp, Homo Sapiens; identical to SEQ ID NO: 7151

SEQ ID NO: 45218 - DNA, 44 bp, Homo Sapiens; identical to SEQ ID NO: 7152

SEQ ID NO: 45219 - DNA, 45 bp, Homo Sapiens; identical to SEQ ID NO: 7153

SEQ ID NO: 45220 - DNA, 46 bp, Homo Sapiens; identical to SEQ ID NO: 7154

SEQ ID NO: 45221 - DNA, 39 bp, Homo Sapiens
atgtatgaggccccgggttcgatccccggcatctccacc

SEQ ID NO: 45222 - DNA, 17 bp, Homo Sapiens
atgtccgcgtgggttcg

SEQ ID NO: 45223 - DNA, 27 bp, Homo Sapiens
atgtccgcgtgggttcgaaccccactc

SEQ ID NO: 45224 - DNA, 30 bp, Homo Sapiens; identical to SEQ ID NO: 7173

SEQ ID NO: 45225 - DNA, 26 bp, Homo Sapiens
atgtctaacaacatggctttctcacc

SEQ ID NO: 45226 - DNA, 18 bp, Homo Sapiens
atgttggttatacccttc

SEQ ID NO: 45227 - DNA, 23 bp, Homo Sapiens
atgttggttatacccttcccgta

SEQ ID NO: 45228 - DNA, 25 bp, Homo Sapiens
atgttggttatacccttcccgtact

SEQ ID NO: 45229 - DNA, 28 bp, Homo Sapiens
atgttggttatacccttcccgtactacc

SEQ ID NO: 45230 - DNA, 29 bp, Homo Sapiens
atgttggttatacccttcccgtactacca

SEQ ID NO: 45231 - DNA, 16 bp, Homo Sapiens
atgtttagacgggctc

SEQ ID NO: 45232 - DNA, 17 bp, Homo Sapiens
atgtttagacgggctca

SEQ ID NO: 45233 - DNA, 18 bp, Homo Sapiens
atgtttagacgggctcac

SEQ ID NO: 45234 - DNA, 19 bp, Homo Sapiens
atgtttagacgggctcaca

SEQ ID NO: 45235 - DNA, 21 bp, Homo Sapiens
atgtttagacgggctcacatc

SEQ ID NO: 45236 - DNA, 22 bp, Homo Sapiens
atgtttagacgggctcacatca

SEQ ID NO: 45237 - DNA, 24 bp, Homo Sapiens
atgtttagacgggctcacatcacc

SEQ ID NO: 45238 - DNA, 25 bp, Homo Sapiens
atgtttagacgggctcacatcaccc

SEQ ID NO: 45239 - DNA, 26 bp, Homo Sapiens
atgtttagacgggctcacatcacccc

SEQ ID NO: 45240 - DNA, 27 bp, Homo Sapiens
atgtttagacgggctcacatcacccca

SEQ ID NO: 45241 - DNA, 29 bp, Homo Sapiens
atgtttagacgggctcacatcaccccata

SEQ ID NO: 45242 - DNA, 30 bp, Homo Sapiens; identical to SEQ ID NO: 7219

SEQ ID NO: 45243 - DNA, 31 bp, Homo Sapiens; identical to SEQ ID NO: 7220

SEQ ID NO: 45244 - DNA, 35 bp, Homo Sapiens; identical to SEQ ID NO: 7224

SEQ ID NO: 45245 - DNA, 36 bp, Homo Sapiens; identical to SEQ ID NO: 7225

SEQ ID NO: 45246 - DNA, 16 bp, Homo Sapiens
attaactagttttgac

SEQ ID NO: 45247 - DNA, 34 bp, Homo Sapiens; identical to SEQ ID NO: 7248

SEQ ID NO: 45248 - DNA, 31 bp, Homo Sapiens; identical to SEQ ID NO: 7262

SEQ ID NO: 45249 - DNA, 32 bp, Homo Sapiens; identical to SEQ ID NO: 7263

SEQ ID NO: 45250 - DNA, 33 bp, Homo Sapiens; identical to SEQ ID NO: 7264

SEQ ID NO: 45251 - DNA, 23 bp, Homo Sapiens
attagaatcttagctttgggtgc

SEQ ID NO: 45252 - DNA, 17 bp, Homo Sapiens
attcaaaggttccgggt

SEQ ID NO: 45253 - DNA, 35 bp, Homo Sapiens; identical to SEQ ID NO: 7311

SEQ ID NO: 45254 - DNA, 38 bp, Homo Sapiens; identical to SEQ ID NO: 7314

SEQ ID NO: 45255 - DNA, 39 bp, Homo Sapiens; identical to SEQ ID NO: 7315

SEQ ID NO: 45256 - DNA, 38 bp, Homo Sapiens; identical to SEQ ID NO: 7319

SEQ ID NO: 45257 - DNA, 38 bp, Homo Sapiens; identical to SEQ ID NO: 7322

SEQ ID NO: 45258 - DNA, 19 bp, Homo Sapiens
attccagctcgaaggacca

SEQ ID NO: 45259 - DNA, 28 bp, Homo Sapiens
attccaggttcgactcctggctggctcg

SEQ ID NO: 45260 - DNA, 30 bp, Homo Sapiens; identical to SEQ ID NO: 7329

SEQ ID NO: 45261 - DNA, 23 bp, Homo Sapiens
attcccattcttgcgacccgggt

SEQ ID NO: 45262 - DNA, 44 bp, Homo Sapiens; identical to SEQ ID NO: 7333

SEQ ID NO: 45263 - DNA, 16 bp, Homo Sapiens
attccccgacggggag

SEQ ID NO: 45264 - DNA, 17 bp, Homo Sapiens
attccccgacggggagc

SEQ ID NO: 45265 - DNA, 18 bp, Homo Sapiens
attccccgacggggagcc

SEQ ID NO: 45266 - DNA, 17 bp, Homo Sapiens
attcccggccaacgcac

SEQ ID NO: 45267 - DNA, 18 bp, Homo Sapiens
attcccggccaacgcacc

SEQ ID NO: 45268 - DNA, 19 bp, Homo Sapiens
attcccggccaacgcacca

SEQ ID NO: 45269 - DNA, 17 bp, Homo Sapiens
attcccggccaatgcac

SEQ ID NO: 45270 - DNA, 18 bp, Homo Sapiens
attcccggccaatgcacc

SEQ ID NO: 45271 - DNA, 19 bp, Homo Sapiens
attcccggccaatgcacca

SEQ ID NO: 45272 - DNA, 19 bp, Homo Sapiens
attcccggcccatgcacca

SEQ ID NO: 45273 - DNA, 16 bp, Homo Sapiens
attcccgggcggcgca

SEQ ID NO: 45274 - DNA, 18 bp, Homo Sapiens
attcccgggcggcgcacc

SEQ ID NO: 45275 - DNA, 19 bp, Homo Sapiens
attcccgggcggcgcacca

SEQ ID NO: 45276 - DNA, 16 bp, Homo Sapiens
attcccggtcagggaa

SEQ ID NO: 45277 - DNA, 17 bp, Homo Sapiens
attcccggtcagggaac

SEQ ID NO: 45278 - DNA, 18 bp, Homo Sapiens
attcccggtcagggaacc

SEQ ID NO: 45279 - DNA, 17 bp, Homo Sapiens
attcccggtcatggaac

SEQ ID NO: 45280 - DNA, 20 bp, Homo Sapiens
attccggatcagaagattga

SEQ ID NO: 45281 - DNA, 17 bp, Homo Sapiens
attccggctcgaaggac

SEQ ID NO: 45282 - DNA, 18 bp, Homo Sapiens
attccggctcgaaggacc

SEQ ID NO: 45283 - DNA, 19 bp, Homo Sapiens
attccggctcgaaggacca

SEQ ID NO: 45284 - DNA, 31 bp, Homo Sapiens
attcgaagaagcagcttcaaacctgccgggg

SEQ ID NO: 45285 - DNA, 33 bp, Homo Sapiens; identical to SEQ ID NO: 7380

SEQ ID NO: 45286 - DNA, 34 bp, Homo Sapiens; identical to SEQ ID NO: 7381

SEQ ID NO: 45287 - DNA, 35 bp, Homo Sapiens; identical to SEQ ID NO: 7382

SEQ ID NO: 45288 - DNA, 16 bp, Homo Sapiens
attcggcgctctcacc

SEQ ID NO: 45289 - DNA, 18 bp, Homo Sapiens
attcggcgctctcaccgc

SEQ ID NO: 45290 - DNA, 19 bp, Homo Sapiens
attcggcgctctcaccgcc

SEQ ID NO: 45291 - DNA, 26 bp, Homo Sapiens
attcggcgctctcaccgccgcggccc

SEQ ID NO: 45292 - DNA, 29 bp, Homo Sapiens
attcggcgctctcaccgccgcggcccggg

SEQ ID NO: 45293 - DNA, 30 bp, Homo Sapiens; identical to SEQ ID NO: 7417

SEQ ID NO: 45294 - DNA, 33 bp, Homo Sapiens; identical to SEQ ID NO: 7423

SEQ ID NO: 45295 - DNA, 38 bp, Homo Sapiens; identical to SEQ ID NO: 7427

SEQ ID NO: 45296 - DNA, 17 bp, Homo Sapiens
attctcatagtcctagc

SEQ ID NO: 45297 - DNA, 18 bp, Homo Sapiens
attctcatagtcctagcc

SEQ ID NO: 45298 - DNA, 16 bp, Homo Sapiens
attctcgcctgccacg

SEQ ID NO: 45299 - DNA, 17 bp, Homo Sapiens
attctcgcctgccacgc

SEQ ID NO: 45300 - DNA, 26 bp, Homo Sapiens
attctcgcctgccacgcgggaggccc

SEQ ID NO: 45301 - DNA, 16 bp, Homo Sapiens
attcttgcgacccggg

SEQ ID NO: 45302 - DNA, 17 bp, Homo Sapiens
attcttgcgacccgggt

SEQ ID NO: 45303 - DNA, 18 bp, Homo Sapiens
attcttgcgacccgggtt

SEQ ID NO: 45304 - DNA, 32 bp, Homo Sapiens; identical to SEQ ID NO: 7454

SEQ ID NO: 45305 - DNA, 33 bp, Homo Sapiens; identical to SEQ ID NO: 7455

SEQ ID NO: 45306 - DNA, 34 bp, Homo Sapiens; identical to SEQ ID NO: 7456

SEQ ID NO: 45307 - DNA, 35 bp, Homo Sapiens; identical to SEQ ID NO: 7457

SEQ ID NO: 45308 - DNA, 36 bp, Homo Sapiens; identical to SEQ ID NO: 7458

SEQ ID NO: 45309 - DNA, 37 bp, Homo Sapiens; identical to SEQ ID NO: 7459

SEQ ID NO: 45310 - DNA, 38 bp, Homo Sapiens; identical to SEQ ID NO: 7460

SEQ ID NO: 45311 - DNA, 39 bp, Homo Sapiens; identical to SEQ ID NO: 7461

SEQ ID NO: 45312 - DNA, 30 bp, Homo Sapiens; identical to SEQ ID NO: 7470

SEQ ID NO: 45313 - DNA, 29 bp, Homo Sapiens
attgagggttcgagtcccttcgtggtcgc

SEQ ID NO: 45314 - DNA, 30 bp, Homo Sapiens; identical to SEQ ID NO: 7477

SEQ ID NO: 45315 - DNA, 31 bp, Homo Sapiens; identical to SEQ ID NO: 7478

SEQ ID NO: 45316 - DNA, 32 bp, Homo Sapiens; identical to SEQ ID NO: 7481

SEQ ID NO: 45317 - DNA, 40 bp, Homo Sapiens; identical to SEQ ID NO: 7483

SEQ ID NO: 45318 - DNA, 41 bp, Homo Sapiens; identical to SEQ ID NO: 7484

SEQ ID NO: 45319 - DNA, 19 bp, Homo Sapiens
attgcaggttcgagtcctg

SEQ ID NO: 45320 - DNA, 30 bp, Homo Sapiens; identical to SEQ ID NO: 7490

SEQ ID NO: 45321 - DNA, 25 bp, Homo Sapiens
attggactgtaaatctaaagacagg

SEQ ID NO: 45322 - DNA, 35 bp, Homo Sapiens; identical to SEQ ID NO: 7500

SEQ ID NO: 45323 - DNA, 29 bp, Homo Sapiens
attggacttctaattcaaaggttccgggt

SEQ ID NO: 45324 - DNA, 16 bp, Homo Sapiens
attggtcgtggttgta

SEQ ID NO: 45325 - DNA, 19 bp, Homo Sapiens
attggtcgtggttgtagtc

SEQ ID NO: 45326 - DNA, 20 bp, Homo Sapiens
attggtcgtggttgtagtcc

SEQ ID NO: 45327 - DNA, 21 bp, Homo Sapiens
attggtcgtggttgtagtccg

SEQ ID NO: 45328 - DNA, 22 bp, Homo Sapiens
attggtcgtggttgtagtccgt

SEQ ID NO: 45329 - DNA, 23 bp, Homo Sapiens
attggtcgtggttgtagtccgtg

SEQ ID NO: 45330 - DNA, 24 bp, Homo Sapiens
attggtcgtggttgtagtccgtgc

SEQ ID NO: 45331 - DNA, 25 bp, Homo Sapiens
attggtcgtggttgtagtccgtgcg

SEQ ID NO: 45332 - DNA, 26 bp, Homo Sapiens
attggtcgtggttgtagtccgtgcga

SEQ ID NO: 45333 - DNA, 27 bp, Homo Sapiens
attggtcgtggttgtagtccgtgcgag

SEQ ID NO: 45334 - DNA, 28 bp, Homo Sapiens
attggtcgtggttgtagtccgtgcgaga

SEQ ID NO: 45335 - DNA, 29 bp, Homo Sapiens
attggtcgtggttgtagtccgtgcgagaa

SEQ ID NO: 45336 - DNA, 30 bp, Homo Sapiens; identical to SEQ ID NO: 7529

SEQ ID NO: 45337 - DNA, 31 bp, Homo Sapiens; identical to SEQ ID NO: 7530

SEQ ID NO: 45338 - DNA, 32 bp, Homo Sapiens; identical to SEQ ID NO: 7531

SEQ ID NO: 45339 - DNA, 33 bp, Homo Sapiens; identical to SEQ ID NO: 7532

SEQ ID NO: 45340 - DNA, 34 bp, Homo Sapiens; identical to SEQ ID NO: 7533

SEQ ID NO: 45341 - DNA, 16 bp, Homo Sapiens
attggtggttcagtgg

SEQ ID NO: 45342 - DNA, 23 bp, Homo Sapiens
attggtggttcagtggtagaatt

SEQ ID NO: 45343 - DNA, 24 bp, Homo Sapiens
attggtggttcagtggtagaattc

SEQ ID NO: 45344 - DNA, 25 bp, Homo Sapiens
attggtggttcagtggtagaattct

SEQ ID NO: 45345 - DNA, 26 bp, Homo Sapiens
attggtggttcagtggtagaattctc

SEQ ID NO: 45346 - DNA, 27 bp, Homo Sapiens
attggtggttcagtggtagaattctcg

SEQ ID NO: 45347 - DNA, 28 bp, Homo Sapiens
attggtggttcagtggtagaattctcgc

SEQ ID NO: 45348 - DNA, 29 bp, Homo Sapiens
attggtggttcagtggtagaattctcgcc

SEQ ID NO: 45349 - DNA, 30 bp, Homo Sapiens; identical to SEQ ID NO: 7557

SEQ ID NO: 45350 - DNA, 31 bp, Homo Sapiens; identical to SEQ ID NO: 7563

SEQ ID NO: 45351 - DNA, 32 bp, Homo Sapiens; identical to SEQ ID NO: 7564

SEQ ID NO: 45352 - DNA, 33 bp, Homo Sapiens; identical to SEQ ID NO: 7565

SEQ ID NO: 45353 - DNA, 34 bp, Homo Sapiens; identical to SEQ ID NO: 7566

SEQ ID NO: 45354 - DNA, 35 bp, Homo Sapiens; identical to SEQ ID NO: 7567

SEQ ID NO: 45355 - DNA, 36 bp, Homo Sapiens; identical to SEQ ID NO: 7568

SEQ ID NO: 45356 - DNA, 37 bp, Homo Sapiens; identical to SEQ ID NO: 7569

SEQ ID NO: 45357 - DNA, 17 bp, Homo Sapiens
attgtgaatctgacaac

SEQ ID NO: 45358 - DNA, 20 bp, Homo Sapiens
attgtgaatctgacaacaga

SEQ ID NO: 45359 - DNA, 22 bp, Homo Sapiens
attgtgaatctgacaacagagg

SEQ ID NO: 45360 - DNA, 23 bp, Homo Sapiens
attgtgaatctgacaacagaggc

SEQ ID NO: 45361 - DNA, 24 bp, Homo Sapiens
attgtgaatctgacaacagaggct

SEQ ID NO: 45362 - DNA, 25 bp, Homo Sapiens
attgtgaatctgacaacagaggctt

SEQ ID NO: 45363 - DNA, 26 bp, Homo Sapiens
attgtgaatctgacaacagaggctta

SEQ ID NO: 45364 - DNA, 28 bp, Homo Sapiens
attgtgaatctgacaacagaggcttacg

SEQ ID NO: 45365 - DNA, 29 bp, Homo Sapiens
attgtgaatctgacaacagaggcttacga

SEQ ID NO: 45366 - DNA, 31 bp, Homo Sapiens; identical to SEQ ID NO: 7597

SEQ ID NO: 45367 - DNA, 32 bp, Homo Sapiens; identical to SEQ ID NO: 7598

SEQ ID NO: 45368 - DNA, 33 bp, Homo Sapiens; identical to SEQ ID NO: 7599

SEQ ID NO: 45369 - DNA, 34 bp, Homo Sapiens; identical to SEQ ID NO: 7600

SEQ ID NO: 45370 - DNA, 36 bp, Homo Sapiens; identical to SEQ ID NO: 7602

SEQ ID NO: 45371 - DNA, 37 bp, Homo Sapiens; identical to SEQ ID NO: 7603

SEQ ID NO: 45372 - DNA, 42 bp, Homo Sapiens; identical to SEQ ID NO: 7608

SEQ ID NO: 45373 - DNA, 43 bp, Homo Sapiens; identical to SEQ ID NO: 7609

SEQ ID NO: 45374 - DNA, 44 bp, Homo Sapiens; identical to SEQ ID NO: 7610

SEQ ID NO: 45375 - DNA, 45 bp, Homo Sapiens; identical to SEQ ID NO: 7611

SEQ ID NO: 45376 - DNA, 22 bp, Homo Sapiens
attgtgctctgcacgcgtgggt

SEQ ID NO: 45377 - DNA, 43 bp, Homo Sapiens; identical to SEQ ID NO: 7621

SEQ ID NO: 45378 - DNA, 28 bp, Homo Sapiens
attgtgggttcgagtcccatctggggtg

SEQ ID NO: 45379 - DNA, 30 bp, Homo Sapiens; identical to SEQ ID NO: 7630

SEQ ID NO: 45380 - DNA, 27 bp, Homo Sapiens
atttaggttaaatacagaccaagagcc

SEQ ID NO: 45381 - DNA, 18 bp, Homo Sapiens
atttcaacttaacttgac

SEQ ID NO: 45382 - DNA, 19 bp, Homo Sapiens
atttcaacttaacttgacc

SEQ ID NO: 45383 - DNA, 20 bp, Homo Sapiens
atttcaacttaacttgaccg

SEQ ID NO: 45384 - DNA, 22 bp, Homo Sapiens
atttcaacttaacttgaccgct

SEQ ID NO: 45385 - DNA, 23 bp, Homo Sapiens
atttcaacttaacttgaccgctc

SEQ ID NO: 45386 - DNA, 25 bp, Homo Sapiens
atttcaacttaacttgaccgctctg

SEQ ID NO: 45387 - DNA, 26 bp, Homo Sapiens
atttcaacttaacttgaccgctctga

SEQ ID NO: 45388 - DNA, 27 bp, Homo Sapiens
atttcaacttaacttgaccgctctgac

SEQ ID NO: 45389 - DNA, 28 bp, Homo Sapiens
atttcaacttaacttgaccgctctgacc

SEQ ID NO: 45390 - DNA, 29 bp, Homo Sapiens
atttcaacttaacttgaccgctctgacca

SEQ ID NO: 45391 - DNA, 34 bp, Homo Sapiens; identical to SEQ ID NO: 7655

SEQ ID NO: 45392 - DNA, 17 bp, Homo Sapiens
atttcgatggcgtgggt

SEQ ID NO: 45393 - DNA, 40 bp, Homo Sapiens; identical to SEQ ID NO: 7691

SEQ ID NO: 45394 - DNA, 42 bp, Homo Sapiens; identical to SEQ ID NO: 33683

SEQ ID NO: 45395 - DNA, 43 bp, Homo Sapiens; identical to SEQ ID NO: 7692

SEQ ID NO: 45396 - DNA, 30 bp, Homo Sapiens; identical to SEQ ID NO: 7702

SEQ ID NO: 45397 - DNA, 21 bp, Homo Sapiens
caaaacatcagattgtgaatc

SEQ ID NO: 45398 - DNA, 34 bp, Homo Sapiens; identical to SEQ ID NO: 7734

SEQ ID NO: 45399 - DNA, 35 bp, Homo Sapiens; identical to SEQ ID NO: 7735

SEQ ID NO: 45400 - DNA, 36 bp, Homo Sapiens; identical to SEQ ID NO: 7736

SEQ ID NO: 45401 - DNA, 37 bp, Homo Sapiens; identical to SEQ ID NO: 7737

SEQ ID NO: 45402 - DNA, 39 bp, Homo Sapiens; identical to SEQ ID NO: 7739

SEQ ID NO: 45403 - DNA, 41 bp, Homo Sapiens; identical to SEQ ID NO: 7741

SEQ ID NO: 45404 - DNA, 42 bp, Homo Sapiens; identical to SEQ ID NO: 7742

SEQ ID NO: 45405 - DNA, 43 bp, Homo Sapiens; identical to SEQ ID NO: 7743

SEQ ID NO: 45406 - DNA, 44 bp, Homo Sapiens; identical to SEQ ID NO: 7744

SEQ ID NO: 45407 - DNA, 45 bp, Homo Sapiens; identical to SEQ ID NO: 7745

SEQ ID NO: 45408 - DNA, 46 bp, Homo Sapiens; identical to SEQ ID NO: 7746

SEQ ID NO: 45409 - DNA, 47 bp, Homo Sapiens; identical to SEQ ID NO: 7747

SEQ ID NO: 45410 - DNA, 16 bp, Homo Sapiens
caaacctgccggggct

SEQ ID NO: 45411 - DNA, 17 bp, Homo Sapiens
caaacctgccggggctt

SEQ ID NO: 45412 - DNA, 19 bp, Homo Sapiens
caaacctgccggggcttcc

SEQ ID NO: 45413 - DNA, 20 bp, Homo Sapiens
caaacctgccggggcttcca

SEQ ID NO: 45414 - DNA, 32 bp, Homo Sapiens; identical to SEQ ID NO: 7798

SEQ ID NO: 45415 - DNA, 33 bp, Homo Sapiens; identical to SEQ ID NO: 7799

SEQ ID NO: 45416 - DNA, 34 bp, Homo Sapiens; identical to SEQ ID NO: 7815

SEQ ID NO: 45417 - DNA, 35 bp, Homo Sapiens; identical to SEQ ID NO: 7816

SEQ ID NO: 45418 - DNA, 36 bp, Homo Sapiens; identical to SEQ ID NO: 7817

SEQ ID NO: 45419 - DNA, 35 bp, Homo Sapiens; identical to SEQ ID NO: 7819

SEQ ID NO: 45420 - DNA, 35 bp, Homo Sapiens; identical to SEQ ID NO: 7821

SEQ ID NO: 45421 - DNA, 20 bp, Homo Sapiens
caaatcacgtcggggtcacc

SEQ ID NO: 45422 - DNA, 21 bp, Homo Sapiens
caaatcacgtcggggtcacca

SEQ ID NO: 45423 - DNA, 16 bp, Homo Sapiens
caaatcccggacgagc

SEQ ID NO: 45424 - DNA, 17 bp, Homo Sapiens
caaatcccggacgagcc

SEQ ID NO: 45425 - DNA, 18 bp, Homo Sapiens
caaatcccggacgagccc

SEQ ID NO: 45426 - DNA, 19 bp, Homo Sapiens
caaatcccggacgagcccc

SEQ ID NO: 45427 - DNA, 20 bp, Homo Sapiens
caaatcccggacgagccccc

SEQ ID NO: 45428 - DNA, 21 bp, Homo Sapiens
caaatcccggacgagccccca

SEQ ID NO: 45429 - DNA, 19 bp, Homo Sapiens
caaatccgggtgccccctc

SEQ ID NO: 45430 - DNA, 20 bp, Homo Sapiens
caaatccgggtgccccctcc

SEQ ID NO: 45431 - DNA, 18 bp, Homo Sapiens
caaatctcgctggggcct

SEQ ID NO: 45432 - DNA, 19 bp, Homo Sapiens
caaatctcgctggggcctc

SEQ ID NO: 45433 - DNA, 20 bp, Homo Sapiens
caaatctcgctggggcctcc

SEQ ID NO: 45434 - DNA, 21 bp, Homo Sapiens
caaatctcgctggggcctcca

SEQ ID NO: 45435 - DNA, 17 bp, Homo Sapiens
caaatctcggtggaacc

SEQ ID NO: 45436 - DNA, 18 bp, Homo Sapiens
caaatctcggtggaacct

SEQ ID NO: 45437 - DNA, 19 bp, Homo Sapiens
caaatctcggtggaacctc

SEQ ID NO: 45438 - DNA, 20 bp, Homo Sapiens
caaatctcggtggaacctcc

SEQ ID NO: 45439 - DNA, 21 bp, Homo Sapiens
caaatctcggtggaacctcca

SEQ ID NO: 45440 - DNA, 17 bp, Homo Sapiens
caaatctcggtgggacc

SEQ ID NO: 45441 - DNA, 18 bp, Homo Sapiens
caaatctcggtgggacct

SEQ ID NO: 45442 - DNA, 19 bp, Homo Sapiens
caaatctcggtgggacctc

SEQ ID NO: 45443 - DNA, 20 bp, Homo Sapiens
caaatctcggtgggacctcc

SEQ ID NO: 45444 - DNA, 21 bp, Homo Sapiens
caaatctcggtgggacctcca

SEQ ID NO: 45445 - DNA, 19 bp, Homo Sapiens
caaatggtagagcgctcgc

SEQ ID NO: 45446 - DNA, 35 bp, Homo Sapiens; identical to SEQ ID NO: 7862

SEQ ID NO: 45447 - DNA, 36 bp, Homo Sapiens; identical to SEQ ID NO: 7863

SEQ ID NO: 45448 - DNA, 37 bp, Homo Sapiens; identical to SEQ ID NO: 7864

SEQ ID NO: 45449 - DNA, 38 bp, Homo Sapiens; identical to SEQ ID NO: 7865

SEQ ID NO: 45450 - DNA, 39 bp, Homo Sapiens; identical to SEQ ID NO: 7866

SEQ ID NO: 45451 - DNA, 21 bp, Homo Sapiens
caacacctctttacagtgacc

SEQ ID NO: 45452 - DNA, 22 bp, Homo Sapiens
caacacctctttacagtgacca

SEQ ID NO: 45453 - DNA, 18 bp, Homo Sapiens
caacagaggcttacgacc

SEQ ID NO: 45454 - DNA, 19 bp, Homo Sapiens
caacagaggcttacgaccc

SEQ ID NO: 45455 - DNA, 31 bp, Homo Sapiens; identical to SEQ ID NO: 7882

SEQ ID NO: 45456 - DNA, 18 bp, Homo Sapiens
caacatggctttctcacc

SEQ ID NO: 45457 - DNA, 28 bp, Homo Sapiens
caacctcggttcgaatccgagtcacggc

SEQ ID NO: 45458 - DNA, 30 bp, Homo Sapiens; identical to SEQ ID NO: 7895

SEQ ID NO: 45459 - DNA, 45 bp, Homo Sapiens
caacgatggtttttcatatcattggtcgtggttgtagtccgtgcg

SEQ ID NO: 45460 - DNA, 16 bp, Homo Sapiens
caacttaacttgaccg

SEQ ID NO: 45461 - DNA, 19 bp, Homo Sapiens
caacttaacttgaccgctc

SEQ ID NO: 45462 - DNA, 21 bp, Homo Sapiens
caacttaacttgaccgctctg

SEQ ID NO: 45463 - DNA, 22 bp, Homo Sapiens
caacttaacttgaccgctctga

SEQ ID NO: 45464 - DNA, 23 bp, Homo Sapiens
caacttaacttgaccgctctgac

SEQ ID NO: 45465 - DNA, 24 bp, Homo Sapiens
caacttaacttgaccgctctgacc

SEQ ID NO: 45466 - DNA, 25 bp, Homo Sapiens
caacttaacttgaccgctctgacca

SEQ ID NO: 45467 - DNA, 17 bp, Homo Sapiens
caacttacacttaggag

SEQ ID NO: 45468 - DNA, 26 bp, Homo Sapiens
caacttacacttaggagatttcaact

SEQ ID NO: 45469 - DNA, 36 bp, Homo Sapiens; identical to SEQ ID NO: 7954

SEQ ID NO: 45470 - DNA, 37 bp, Homo Sapiens; identical to SEQ ID NO: 7955

SEQ ID NO: 45471 - DNA, 39 bp, Homo Sapiens; identical to SEQ ID NO: 7957

SEQ ID NO: 45472 - DNA, 40 bp, Homo Sapiens; identical to SEQ ID NO: 7958

SEQ ID NO: 45473 - DNA, 41 bp, Homo Sapiens; identical to SEQ ID NO: 7959

SEQ ID NO: 45474 - DNA, 42 bp, Homo Sapiens; identical to SEQ ID NO: 7960

SEQ ID NO: 45475 - DNA, 43 bp, Homo Sapiens; identical to SEQ ID NO: 7961

SEQ ID NO: 45476 - DNA, 44 bp, Homo Sapiens; identical to SEQ ID NO: 7962

SEQ ID NO: 45477 - DNA, 45 bp, Homo Sapiens; identical to SEQ ID NO: 7963

SEQ ID NO: 45478 - DNA, 46 bp, Homo Sapiens; identical to SEQ ID NO: 7964

SEQ ID NO: 45479 - DNA, 24 bp, Homo Sapiens
caagaactgctaactcatgccccc

SEQ ID NO: 45480 - DNA, 30 bp, Homo Sapiens; identical to SEQ ID NO: 7979

SEQ ID NO: 45481 - DNA, 37 bp, Homo Sapiens; identical to SEQ ID NO: 7986

SEQ ID NO: 45482 - DNA, 39 bp, Homo Sapiens; identical to SEQ ID NO: 7988

SEQ ID NO: 45483 - DNA, 40 bp, Homo Sapiens; identical to SEQ ID NO: 7989

SEQ ID NO: 45484 - DNA, 42 bp, Homo Sapiens; identical to SEQ ID NO: 7991

SEQ ID NO: 45485 - DNA, 43 bp, Homo Sapiens; identical to SEQ ID NO: 7992

SEQ ID NO: 45486 - DNA, 45 bp, Homo Sapiens; identical to SEQ ID NO: 7994

SEQ ID NO: 45487 - DNA, 46 bp, Homo Sapiens; identical to SEQ ID NO: 7995

SEQ ID NO: 45488 - DNA, 34 bp, Homo Sapiens; identical to SEQ ID NO: 8006

SEQ ID NO: 45489 - DNA, 35 bp, Homo Sapiens; identical to SEQ ID NO: 8007

SEQ ID NO: 45490 - DNA, 36 bp, Homo Sapiens; identical to SEQ ID NO: 8008

SEQ ID NO: 45491 - DNA, 35 bp, Homo Sapiens; identical to SEQ ID NO: 33801

SEQ ID NO: 45492 - DNA, 35 bp, Homo Sapiens; identical to SEQ ID NO: 33804

SEQ ID NO: 45493 - DNA, 36 bp, Homo Sapiens; identical to SEQ ID NO: 33805

SEQ ID NO: 45494 - DNA, 18 bp, Homo Sapiens
caagcagttgacccgggt

SEQ ID NO: 45495 - DNA, 30 bp, Homo Sapiens; identical to SEQ ID NO: 8036

SEQ ID NO: 45496 - DNA, 20 bp, Homo Sapiens
caagtcacgtcggggtcacc

SEQ ID NO: 45497 - DNA, 17 bp, Homo Sapiens
caagtccctgttcgggc

SEQ ID NO: 45498 - DNA, 19 bp, Homo Sapiens
caagtccctgttcgggcgc

SEQ ID NO: 45499 - DNA, 20 bp, Homo Sapiens
caagtccctgttcgggcgcc

SEQ ID NO: 45500 - DNA, 32 bp, Homo Sapiens; identical to SEQ ID NO: 8072

SEQ ID NO: 45501 - DNA, 18 bp, Homo Sapiens
caatacttaatttctgcc

SEQ ID NO: 45502 - DNA, 19 bp, Homo Sapiens
caatacttaatttctgcca

SEQ ID NO: 45503 - DNA, 20 bp, Homo Sapiens
caatccccggcacctccacc

SEQ ID NO: 45504 - DNA, 21 bp, Homo Sapiens
caatccccggcacctccacca

SEQ ID NO: 45505 - DNA, 20 bp, Homo Sapiens
caatccccggcatctccacc

SEQ ID NO: 45506 - DNA, 19 bp, Homo Sapiens
caatcccgggtttcggcac

SEQ ID NO: 45507 - DNA, 35 bp, Homo Sapiens; identical to SEQ ID NO: 8105

SEQ ID NO: 45508 - DNA, 36 bp, Homo Sapiens; identical to SEQ ID NO: 8106

SEQ ID NO: 45509 - DNA, 37 bp, Homo Sapiens; identical to SEQ ID NO: 8107

SEQ ID NO: 45510 - DNA, 19 bp, Homo Sapiens
caatggataacgcgtctga

SEQ ID NO: 45511 - DNA, 21 bp, Homo Sapiens
caatggataacgcgtctgact

SEQ ID NO: 45512 - DNA, 17 bp, Homo Sapiens
caatggatagcgcattg

SEQ ID NO: 45513 - DNA, 18 bp, Homo Sapiens
caatggatagcgcattgg

SEQ ID NO: 45514 - DNA, 19 bp, Homo Sapiens
caatggatagcgcattgga

SEQ ID NO: 45515 - DNA, 20 bp, Homo Sapiens
caatggatagcgcattggac

SEQ ID NO: 45516 - DNA, 21 bp, Homo Sapiens
caatggatagcgcattggact

SEQ ID NO: 45517 - DNA, 23 bp, Homo Sapiens
caatggatagcgcattggacttc

SEQ ID NO: 45518 - DNA, 42 bp, Homo Sapiens; identical to SEQ ID NO: 33839

SEQ ID NO: 45519 - DNA, 18 bp, Homo Sapiens
caattaactagttttgac

SEQ ID NO: 45520 - DNA, 19 bp, Homo Sapiens
caattccccgacggggagc

SEQ ID NO: 45521 - DNA, 20 bp, Homo Sapiens
caattccccgacggggagcc

SEQ ID NO: 45522 - DNA, 36 bp, Homo Sapiens; identical to SEQ ID NO: 8161

SEQ ID NO: 45523 - DNA, 17 bp, Homo Sapiens
cacaagaactgctaact

SEQ ID NO: 45524 - DNA, 22 bp, Homo Sapiens
cacaagaactgctaactcatgc

SEQ ID NO: 45525 - DNA, 26 bp, Homo Sapiens
cacaagaactgctaactcatgccccc

SEQ ID NO: 45526 - DNA, 29 bp, Homo Sapiens
cacaagaactgctaactcatgcccccatg

SEQ ID NO: 45527 - DNA, 38 bp, Homo Sapiens; identical to SEQ ID NO: 8191

SEQ ID NO: 45528 - DNA, 44 bp, Homo Sapiens; identical to SEQ ID NO: 8197

SEQ ID NO: 45529 - DNA, 45 bp, Homo Sapiens; identical to SEQ ID NO: 8198

SEQ ID NO: 45530 - DNA, 21 bp, Homo Sapiens
cacacgcgaaaggtccccggt

SEQ ID NO: 45531 - DNA, 32 bp, Homo Sapiens; identical to SEQ ID NO: 8204

SEQ ID NO: 45532 - DNA, 33 bp, Homo Sapiens; identical to SEQ ID NO: 8205

SEQ ID NO: 45533 - DNA, 28 bp, Homo Sapiens
cacaggttcgaatcctgttcgtgacgcc

SEQ ID NO: 45534 - DNA, 20 bp, Homo Sapiens
cacatcaccccataaacacc

SEQ ID NO: 45535 - DNA, 21 bp, Homo Sapiens
cacatcaccccataaacacca

SEQ ID NO: 45536 - DNA, 23 bp, Homo Sapiens
cacatggtctagcggttaggatt

SEQ ID NO: 45537 - DNA, 25 bp, Homo Sapiens
cacatggtctagcggttaggattcc

SEQ ID NO: 45538 - DNA, 26 bp, Homo Sapiens
cacatggtctagcggttaggattcct

SEQ ID NO: 45539 - DNA, 27 bp, Homo Sapiens
cacatggtctagcggttaggattcctg

SEQ ID NO: 45540 - DNA, 28 bp, Homo Sapiens
cacatggtctagcggttaggattcctgg

SEQ ID NO: 45541 - DNA, 29 bp, Homo Sapiens
cacatggtctagcggttaggattcctggt

SEQ ID NO: 45542 - DNA, 30 bp, Homo Sapiens; identical to SEQ ID NO: 8223

SEQ ID NO: 45543 - DNA, 31 bp, Homo Sapiens; identical to SEQ ID NO: 8224

SEQ ID NO: 45544 - DNA, 32 bp, Homo Sapiens; identical to SEQ ID NO: 8225

SEQ ID NO: 45545 - DNA, 33 bp, Homo Sapiens; identical to SEQ ID NO: 8226

SEQ ID NO: 45546 - DNA, 34 bp, Homo Sapiens; identical to SEQ ID NO: 8227

SEQ ID NO: 45547 - DNA, 44 bp, Homo Sapiens; identical to SEQ ID NO: 8255

SEQ ID NO: 45548 - DNA, 47 bp, Homo Sapiens; identical to SEQ ID NO: 8258

SEQ ID NO: 45549 - DNA, 19 bp, Homo Sapiens
cacccaggcggcccgggtt

SEQ ID NO: 45550 - DNA, 33 bp, Homo Sapiens; identical to SEQ ID NO: 8269

SEQ ID NO: 45551 - DNA, 34 bp, Homo Sapiens; identical to SEQ ID NO: 8270

SEQ ID NO: 45552 - DNA, 35 bp, Homo Sapiens; identical to SEQ ID NO: 8271

SEQ ID NO: 45553 - DNA, 37 bp, Homo Sapiens; identical to SEQ ID NO: 8273

SEQ ID NO: 45554 - DNA, 38 bp, Homo Sapiens; identical to SEQ ID NO: 8274

SEQ ID NO: 45555 - DNA, 39 bp, Homo Sapiens; identical to SEQ ID NO: 8275

SEQ ID NO: 45556 - DNA, 40 bp, Homo Sapiens; identical to SEQ ID NO: 8276

SEQ ID NO: 45557 - DNA, 37 bp, Homo Sapiens; identical to SEQ ID NO: 8283

SEQ ID NO: 45558 - DNA, 38 bp, Homo Sapiens; identical to SEQ ID NO: 8284

SEQ ID NO: 45559 - DNA, 39 bp, Homo Sapiens; identical to SEQ ID NO: 8285

SEQ ID NO: 45560 - DNA, 19 bp, Homo Sapiens
caccgccgcggcccgggtt

SEQ ID NO: 45561 - DNA, 24 bp, Homo Sapiens
caccgccgcggcccgggttcgatt

SEQ ID NO: 45562 - DNA, 34 bp, Homo Sapiens; identical to SEQ ID NO: 8309

SEQ ID NO: 45563 - DNA, 35 bp, Homo Sapiens; identical to SEQ ID NO: 8310

SEQ ID NO: 45564 - DNA, 37 bp, Homo Sapiens; identical to SEQ ID NO: 8312

SEQ ID NO: 45565 - DNA, 38 bp, Homo Sapiens; identical to SEQ ID NO: 8313

SEQ ID NO: 45566 - DNA, 39 bp, Homo Sapiens; identical to SEQ ID NO: 8314

SEQ ID NO: 45567 - DNA, 40 bp, Homo Sapiens; identical to SEQ ID NO: 8315

SEQ ID NO: 45568 - DNA, 17 bp, Homo Sapiens
cacctctttacagtgac

SEQ ID NO: 45569 - DNA, 18 bp, Homo Sapiens
cacctctttacagtgacc

SEQ ID NO: 45570 - DNA, 19 bp, Homo Sapiens
cacctctttacagtgacca

SEQ ID NO: 45571 - DNA, 33 bp, Homo Sapiens; identical to SEQ ID NO: 33906

SEQ ID NO: 45572 - DNA, 34 bp, Homo Sapiens; identical to SEQ ID NO: 33907

SEQ ID NO: 45573 - DNA, 35 bp, Homo Sapiens; identical to SEQ ID NO: 33908

SEQ ID NO: 45574 - DNA, 36 bp, Homo Sapiens; identical to SEQ ID NO: 8323

SEQ ID NO: 45575 - DNA, 37 bp, Homo Sapiens
cacgaggccccgggttcaatccccggcacctccacca

SEQ ID NO: 45576 - DNA, 16 bp, Homo Sapiens
cacgcagaaggtcctg

SEQ ID NO: 45577 - DNA, 36 bp, Homo Sapiens; identical to SEQ ID NO: 8327

SEQ ID NO: 45578 - DNA, 37 bp, Homo Sapiens
cacgcagaaggtcctgggttcgagccccagtggaacc

SEQ ID NO: 45579 - DNA, 39 bp, Homo Sapiens; identical to SEQ ID NO: 8328

SEQ ID NO: 45580 - DNA, 40 bp, Homo Sapiens; identical to SEQ ID NO: 8329

SEQ ID NO: 45581 - DNA, 41 bp, Homo Sapiens; identical to SEQ ID NO: 8330

SEQ ID NO: 45582 - DNA, 19 bp, Homo Sapiens
cacgcgaaaggtccccggt

SEQ ID NO: 45583 - DNA, 37 bp, Homo Sapiens
cacgcgaaaggtccccggttcgaaaccgggcggaaac

SEQ ID NO: 45584 - DNA, 40 bp, Homo Sapiens; identical to SEQ ID NO: 8340

SEQ ID NO: 45585 - DNA, 35 bp, Homo Sapiens; identical to SEQ ID NO: 8354

SEQ ID NO: 45586 - DNA, 38 bp, Homo Sapiens; identical to SEQ ID NO: 8357

SEQ ID NO: 45587 - DNA, 39 bp, Homo Sapiens; identical to SEQ ID NO: 8358

SEQ ID NO: 45588 - DNA, 40 bp, Homo Sapiens; identical to SEQ ID NO: 8359

SEQ ID NO: 45589 - DNA, 32 bp, Homo Sapiens; identical to SEQ ID NO: 8367

SEQ ID NO: 45590 - DNA, 34 bp, Homo Sapiens; identical to SEQ ID NO: 8369

SEQ ID NO: 45591 - DNA, 35 bp, Homo Sapiens; identical to SEQ ID NO: 8370

SEQ ID NO: 45592 - DNA, 36 bp, Homo Sapiens; identical to SEQ ID NO: 8371

SEQ ID NO: 45593 - DNA, 37 bp, Homo Sapiens; identical to SEQ ID NO: 8372

SEQ ID NO: 45594 - DNA, 38 bp, Homo Sapiens; identical to SEQ ID NO: 8373

SEQ ID NO: 45595 - DNA, 39 bp, Homo Sapiens; identical to SEQ ID NO: 8374

SEQ ID NO: 45596 - DNA, 40 bp, Homo Sapiens; identical to SEQ ID NO: 8375

SEQ ID NO: 45597 - DNA, 18 bp, Homo Sapiens
cacgcgggaggcccgggt

SEQ ID NO: 45598 - DNA, 35 bp, Homo Sapiens; identical to SEQ ID NO: 8385

SEQ ID NO: 45599 - DNA, 36 bp, Homo Sapiens; identical to SEQ ID NO: 8386

SEQ ID NO: 45600 - DNA, 39 bp, Homo Sapiens; identical to SEQ ID NO: 8389

SEQ ID NO: 45601 - DNA, 40 bp, Homo Sapiens; identical to SEQ ID NO: 8390

SEQ ID NO: 45602 - DNA, 40 bp, Homo Sapiens
cacgcgggaggcccgggttcgattcccggcccatgcacca

SEQ ID NO: 45603 - DNA, 25 bp, Homo Sapiens
cacgcgtgggttcgaatcccatcct

SEQ ID NO: 45604 - DNA, 27 bp, Homo Sapiens
cacgcgtgggttcgaatcccatcctcg

SEQ ID NO: 45605 - DNA, 31 bp, Homo Sapiens; identical to SEQ ID NO: 8397

SEQ ID NO: 45606 - DNA, 32 bp, Homo Sapiens; identical to SEQ ID NO: 8398

SEQ ID NO: 45607 - DNA, 33 bp, Homo Sapiens; identical to SEQ ID NO: 8399

SEQ ID NO: 45608 - DNA, 33 bp, Homo Sapiens
cacggagaattttggattctcagggatgggttc

SEQ ID NO: 45609 - DNA, 40 bp, Homo Sapiens; identical to SEQ ID NO: 33950

SEQ ID NO: 45610 - DNA, 16 bp, Homo Sapiens
cacgtcggggtcacca

SEQ ID NO: 45611 - DNA, 30 bp, Homo Sapiens; identical to SEQ ID NO: 33955

SEQ ID NO: 45612 - DNA, 16 bp, Homo Sapiens
cactctggactctgaa

SEQ ID NO: 45613 - DNA, 17 bp, Homo Sapiens
cactctggactctgaat

SEQ ID NO: 45614 - DNA, 18 bp, Homo Sapiens
cactctggactctgaatc

SEQ ID NO: 45615 - DNA, 19 bp, Homo Sapiens
cactctggactctgaatcc

SEQ ID NO: 45616 - DNA, 20 bp, Homo Sapiens
cactctggactctgaatcca

SEQ ID NO: 45617 - DNA, 21 bp, Homo Sapiens
cactctggactctgaatccag

SEQ ID NO: 45618 - DNA, 22 bp, Homo Sapiens
cactctggactctgaatccagc

SEQ ID NO: 45619 - DNA, 23 bp, Homo Sapiens
cactctggactctgaatccagcg

SEQ ID NO: 45620 - DNA, 27 bp, Homo Sapiens
cactctggactctgaatccagcgatcc

SEQ ID NO: 45621 - DNA, 29 bp, Homo Sapiens
cactctggactctgaatccagcgatccga

SEQ ID NO: 45622 - DNA, 30 bp, Homo Sapiens; identical to SEQ ID NO: 8428

SEQ ID NO: 45623 - DNA, 31 bp, Homo Sapiens; identical to SEQ ID NO: 8429

SEQ ID NO: 45624 - DNA, 32 bp, Homo Sapiens; identical to SEQ ID NO: 8430

SEQ ID NO: 45625 - DNA, 33 bp, Homo Sapiens; identical to SEQ ID NO: 8431

SEQ ID NO: 45626 - DNA, 34 bp, Homo Sapiens; identical to SEQ ID NO: 8432

SEQ ID NO: 45627 - DNA, 18 bp, Homo Sapiens
cactctggactttgaatc

SEQ ID NO: 45628 - DNA, 19 bp, Homo Sapiens
cactctggactttgaatcc

SEQ ID NO: 45629 - DNA, 23 bp, Homo Sapiens
cactgaaaatgtttagacgggct

SEQ ID NO: 45630 - DNA, 16 bp, Homo Sapiens
cactgtaaagctaact

SEQ ID NO: 45631 - DNA, 17 bp, Homo Sapiens
cactgtaaagctaactt

SEQ ID NO: 45632 - DNA, 23 bp, Homo Sapiens
cactgtaaagctaacttagcatt

SEQ ID NO: 45633 - DNA, 24 bp, Homo Sapiens
cactgtaaagctaacttagcatta

SEQ ID NO: 45634 - DNA, 27 bp, Homo Sapiens
cactgtaaagctaacttagcattaacc

SEQ ID NO: 45635 - DNA, 28 bp, Homo Sapiens
cactgtaaagctaacttagcattaacct

SEQ ID NO: 45636 - DNA, 30 bp, Homo Sapiens; identical to SEQ ID NO: 8478

SEQ ID NO: 45637 - DNA, 31 bp, Homo Sapiens; identical to SEQ ID NO: 8479

SEQ ID NO: 45638 - DNA, 33 bp, Homo Sapiens; identical to SEQ ID NO: 8481

SEQ ID NO: 45639 - DNA, 35 bp, Homo Sapiens; identical to SEQ ID NO: 8483

SEQ ID NO: 45640 - DNA, 38 bp, Homo Sapiens; identical to SEQ ID NO: 8486

SEQ ID NO: 45641 - DNA, 45 bp, Homo Sapiens; identical to SEQ ID NO: 8493

SEQ ID NO: 45642 - DNA, 46 bp, Homo Sapiens; identical to SEQ ID NO: 8494

SEQ ID NO: 45643 - DNA, 47 bp, Homo Sapiens; identical to SEQ ID NO: 8495

SEQ ID NO: 45644 - DNA, 32 bp, Homo Sapiens; identical to SEQ ID NO: 8513

SEQ ID NO: 45645 - DNA, 33 bp, Homo Sapiens; identical to SEQ ID NO: 8514

SEQ ID NO: 45646 - DNA, 35 bp, Homo Sapiens; identical to SEQ ID NO: 8516

SEQ ID NO: 45647 - DNA, 36 bp, Homo Sapiens; identical to SEQ ID NO: 8517

SEQ ID NO: 45648 - DNA, 37 bp, Homo Sapiens; identical to SEQ ID NO: 8518

SEQ ID NO: 45649 - DNA, 38 bp, Homo Sapiens; identical to SEQ ID NO: 8519

SEQ ID NO: 45650 - DNA, 39 bp, Homo Sapiens; identical to SEQ ID NO: 8520

SEQ ID NO: 45651 - DNA, 27 bp, Homo Sapiens
cagaagattccaggttcgactcctggc

SEQ ID NO: 45652 - DNA, 28 bp, Homo Sapiens
cagaagattccaggttcgactcctggct

SEQ ID NO: 45653 - DNA, 35 bp, Homo Sapiens; identical to SEQ ID NO: 8531

SEQ ID NO: 45654 - DNA, 36 bp, Homo Sapiens; identical to SEQ ID NO: 8532

SEQ ID NO: 45655 - DNA, 16 bp, Homo Sapiens
cagaagattctaggtt

SEQ ID NO: 45656 - DNA, 17 bp, Homo Sapiens
cagaagattctaggttc

SEQ ID NO: 45657 - DNA, 18 bp, Homo Sapiens
cagaagattctaggttcg

SEQ ID NO: 45658 - DNA, 27 bp, Homo Sapiens
cagaagattctaggttcgactcctggc

SEQ ID NO: 45659 - DNA, 36 bp, Homo Sapiens; identical to SEQ ID NO: 8546

SEQ ID NO: 45660 - DNA, 16 bp, Homo Sapiens
cagaagattgagggtt

SEQ ID NO: 45661 - DNA, 17 bp, Homo Sapiens
cagaagattgagggttc

SEQ ID NO: 45662 - DNA, 18 bp, Homo Sapiens
cagaagattgagggttcg

SEQ ID NO: 45663 - DNA, 34 bp, Homo Sapiens; identical to SEQ ID NO: 8551

SEQ ID NO: 45664 - DNA, 36 bp, Homo Sapiens; identical to SEQ ID NO: 8552

SEQ ID NO: 45665 - DNA, 36 bp, Homo Sapiens; identical to SEQ ID NO: 8557

SEQ ID NO: 45666 - DNA, 37 bp, Homo Sapiens; identical to SEQ ID NO: 8558

SEQ ID NO: 45667 - DNA, 24 bp, Homo Sapiens
cagaagattgagggttcgagtccc

SEQ ID NO: 45668 - DNA, 35 bp, Homo Sapiens; identical to SEQ ID NO: 8565

SEQ ID NO: 45669 - DNA, 36 bp, Homo Sapiens; identical to SEQ ID NO: 8566

SEQ ID NO: 45670 - DNA, 37 bp, Homo Sapiens; identical to SEQ ID NO: 8567

SEQ ID NO: 45671 - DNA, 16 bp, Homo Sapiens
cagaagattgcaggtt

SEQ ID NO: 45672 - DNA, 17 bp, Homo Sapiens
cagaagattgcaggttc

SEQ ID NO: 45673 - DNA, 33 bp, Homo Sapiens; identical to SEQ ID NO: 8573

SEQ ID NO: 45674 - DNA, 35 bp, Homo Sapiens; identical to SEQ ID NO: 8575

SEQ ID NO: 45675 - DNA, 36 bp, Homo Sapiens; identical to SEQ ID NO: 8576

SEQ ID NO: 45676 - DNA, 17 bp, Homo Sapiens
cagaaggctgcgtgttc

SEQ ID NO: 45677 - DNA, 36 bp, Homo Sapiens; identical to SEQ ID NO: 8583

SEQ ID NO: 45678 - DNA, 21 bp, Homo Sapiens
cagaaggtcctgggttcgagc

SEQ ID NO: 45679 - DNA, 26 bp, Homo Sapiens
cagaaggtcctgggttcgagccccag

SEQ ID NO: 45680 - DNA, 32 bp, Homo Sapiens; identical to SEQ ID NO: 8587

SEQ ID NO: 45681 - DNA, 33 bp, Homo Sapiens; identical to SEQ ID NO: 8588

SEQ ID NO: 45682 - DNA, 34 bp, Homo Sapiens; identical to SEQ ID NO: 8589

SEQ ID NO: 45683 - DNA, 35 bp, Homo Sapiens; identical to SEQ ID NO: 8590

SEQ ID NO: 45684 - DNA, 36 bp, Homo Sapiens; identical to SEQ ID NO: 8591

SEQ ID NO: 45685 - DNA, 37 bp, Homo Sapiens; identical to SEQ ID NO: 8592

SEQ ID NO: 45686 - DNA, 35 bp, Homo Sapiens; identical to SEQ ID NO: 8595

SEQ ID NO: 45687 - DNA, 36 bp, Homo Sapiens; identical to SEQ ID NO: 8596

SEQ ID NO: 45688 - DNA, 36 bp, Homo Sapiens; identical to SEQ ID NO: 8601

SEQ ID NO: 45689 - DNA, 16 bp, Homo Sapiens
cagaccaagagccttc

SEQ ID NO: 45690 - DNA, 17 bp, Homo Sapiens
cagaccaagagccttca

SEQ ID NO: 45691 - DNA, 20 bp, Homo Sapiens
cagaccaagagccttcaaag

SEQ ID NO: 45692 - DNA, 25 bp, Homo Sapiens
cagaccaagagccttcaaagccctc

SEQ ID NO: 45693 - DNA, 27 bp, Homo Sapiens
cagaccaagagccttcaaagccctcag

SEQ ID NO: 45694 - DNA, 22 bp, Homo Sapiens
cagagaatagtttaaattagaa

SEQ ID NO: 45695 - DNA, 24 bp, Homo Sapiens
cagagaatagtttaaattagaatc

SEQ ID NO: 45696 - DNA, 28 bp, Homo Sapiens
cagagaatagtttaaattagaatcttag

SEQ ID NO: 45697 - DNA, 29 bp, Homo Sapiens
cagagaatagtttaaattagaatcttagc

SEQ ID NO: 45698 - DNA, 31 bp, Homo Sapiens; identical to SEQ ID NO: 8638

SEQ ID NO: 45699 - DNA, 32 bp, Homo Sapiens; identical to SEQ ID NO: 8639

SEQ ID NO: 45700 - DNA, 44 bp, Homo Sapiens; identical to SEQ ID NO: 8650

SEQ ID NO: 45701 - DNA, 28 bp, Homo Sapiens
cagaggcttacgaccccttatttacccc

SEQ ID NO: 45702 - DNA, 29 bp, Homo Sapiens
cagaggcttacgaccccttatttacccca

SEQ ID NO: 45703 - DNA, 16 bp, Homo Sapiens
cagaggtcgatggatc

SEQ ID NO: 45704 - DNA, 17 bp, Homo Sapiens
cagaggtcgatggatcg

SEQ ID NO: 45705 - DNA, 22 bp, Homo Sapiens
cagaggtcgatggatcgaaacc

SEQ ID NO: 45706 - DNA, 23 bp, Homo Sapiens
cagaggtcgatggatcgaaacca

SEQ ID NO: 45707 - DNA, 26 bp, Homo Sapiens
cagaggtcgatggatcgaaaccatcc

SEQ ID NO: 45708 - DNA, 19 bp, Homo Sapiens
cagagtggcgcagcggaag

SEQ ID NO: 45709 - DNA, 20 bp, Homo Sapiens
cagagtggcgcagcggaagc

SEQ ID NO: 45710 - DNA, 29 bp, Homo Sapiens
cagagtggcgcagcggaagcgtgctgggc

SEQ ID NO: 45711 - DNA, 31 bp, Homo Sapiens; identical to SEQ ID NO: 8714

SEQ ID NO: 45712 - DNA, 37 bp, Homo Sapiens; identical to SEQ ID NO: 34117

SEQ ID NO: 45713 - DNA, 40 bp, Homo Sapiens; identical to SEQ ID NO: 8719

SEQ ID NO: 45714 - DNA, 47 bp, Homo Sapiens; identical to SEQ ID NO: 8720

SEQ ID NO: 45715 - DNA, 26 bp, Homo Sapiens
cagagtggggttttgcagtccttacc

SEQ ID NO: 45716 - DNA, 27 bp, Homo Sapiens
cagagtggggttttgcagtccttacca

SEQ ID NO: 45717 - DNA, 16 bp, Homo Sapiens
cagagtgtagcttaac

SEQ ID NO: 45718 - DNA, 26 bp, Homo Sapiens
cagagtgtagcttaacacaaagcacc

SEQ ID NO: 45719 - DNA, 27 bp, Homo Sapiens
cagagtgtagcttaacacaaagcaccc

SEQ ID NO: 45720 - DNA, 28 bp, Homo Sapiens
cagagtgtagcttaacacaaagcaccca

SEQ ID NO: 45721 - DNA, 29 bp, Homo Sapiens
cagagtgtagcttaacacaaagcacccaa

SEQ ID NO: 45722 - DNA, 31 bp, Homo Sapiens; identical to SEQ ID NO: 8747

SEQ ID NO: 45723 - DNA, 32 bp, Homo Sapiens; identical to SEQ ID NO: 8748

SEQ ID NO: 45724 - DNA, 35 bp, Homo Sapiens; identical to SEQ ID NO: 8751

SEQ ID NO: 45725 - DNA, 37 bp, Homo Sapiens; identical to SEQ ID NO: 8753

SEQ ID NO: 45726 - DNA, 38 bp, Homo Sapiens; identical to SEQ ID NO: 8754

SEQ ID NO: 45727 - DNA, 39 bp, Homo Sapiens; identical to SEQ ID NO: 8755

SEQ ID NO: 45728 - DNA, 40 bp, Homo Sapiens; identical to SEQ ID NO: 8756

SEQ ID NO: 45729 - DNA, 41 bp, Homo Sapiens; identical to SEQ ID NO: 8757

SEQ ID NO: 45730 - DNA, 42 bp, Homo Sapiens; identical to SEQ ID NO: 8758

SEQ ID NO: 45731 - DNA, 43 bp, Homo Sapiens; identical to SEQ ID NO: 8759

SEQ ID NO: 45732 - DNA, 44 bp, Homo Sapiens; identical to SEQ ID NO: 8760

SEQ ID NO: 45733 - DNA, 45 bp, Homo Sapiens; identical to SEQ ID NO: 8761

SEQ ID NO: 45734 - DNA, 46 bp, Homo Sapiens; identical to SEQ ID NO: 8762

SEQ ID NO: 45735 - DNA, 47 bp, Homo Sapiens; identical to SEQ ID NO: 8763

SEQ ID NO: 45736 - DNA, 41 bp, Homo Sapiens; identical to SEQ ID NO: 8767

SEQ ID NO: 45737 - DNA, 42 bp, Homo Sapiens
cagatcagaaggctgcgtgttcgaatcacgtcggggtcacca

SEQ ID NO: 45738 - DNA, 17 bp, Homo Sapiens
cagattgtgaatctgac

SEQ ID NO: 45739 - DNA, 26 bp, Homo Sapiens
cagattgtgaatctgacaacagaggc

SEQ ID NO: 45740 - DNA, 27 bp, Homo Sapiens
cagattgtgaatctgacaacagaggct

SEQ ID NO: 45741 - DNA, 28 bp, Homo Sapiens
cagattgtgaatctgacaacagaggctt

SEQ ID NO: 45742 - DNA, 33 bp, Homo Sapiens; identical to SEQ ID NO: 8786

SEQ ID NO: 45743 - DNA, 34 bp, Homo Sapiens; identical to SEQ ID NO: 8787

SEQ ID NO: 45744 - DNA, 35 bp, Homo Sapiens; identical to SEQ ID NO: 8788

SEQ ID NO: 45745 - DNA, 36 bp, Homo Sapiens; identical to SEQ ID NO: 8789

SEQ ID NO: 45746 - DNA, 37 bp, Homo Sapiens; identical to SEQ ID NO: 8790

SEQ ID NO: 45747 - DNA, 38 bp, Homo Sapiens; identical to SEQ ID NO: 8791

SEQ ID NO: 45748 - DNA, 41 bp, Homo Sapiens; identical to SEQ ID NO: 8794

SEQ ID NO: 45749 - DNA, 45 bp, Homo Sapiens; identical to SEQ ID NO: 8798

SEQ ID NO: 45750 - DNA, 46 bp, Homo Sapiens; identical to SEQ ID NO: 8799

SEQ ID NO: 45751 - DNA, 47 bp, Homo Sapiens; identical to SEQ ID NO: 8800

SEQ ID NO: 45752 - DNA, 31 bp, Homo Sapiens; identical to SEQ ID NO: 8805

SEQ ID NO: 45753 - DNA, 33 bp, Homo Sapiens; identical to SEQ ID NO: 8807

SEQ ID NO: 45754 - DNA, 34 bp, Homo Sapiens; identical to SEQ ID NO: 8808

SEQ ID NO: 45755 - DNA, 35 bp, Homo Sapiens; identical to SEQ ID NO: 8809

SEQ ID NO: 45756 - DNA, 32 bp, Homo Sapiens; identical to SEQ ID NO: 8821

SEQ ID NO: 45757 - DNA, 23 bp, Homo Sapiens
cagcctccggagctggggattgt

SEQ ID NO: 45758 - DNA, 16 bp, Homo Sapiens
cagcgatccgagttca

SEQ ID NO: 45759 - DNA, 33 bp, Homo Sapiens; identical to SEQ ID NO: 8832

SEQ ID NO: 45760 - DNA, 34 bp, Homo Sapiens; identical to SEQ ID NO: 8833

SEQ ID NO: 45761 - DNA, 30 bp, Homo Sapiens; identical to SEQ ID NO: 8835

SEQ ID NO: 45762 - DNA, 32 bp, Homo Sapiens; identical to SEQ ID NO: 8837

SEQ ID NO: 45763 - DNA, 33 bp, Homo Sapiens; identical to SEQ ID NO: 8838

SEQ ID NO: 45764 - DNA, 34 bp, Homo Sapiens; identical to SEQ ID NO: 8839

SEQ ID NO: 45765 - DNA, 33 bp, Homo Sapiens; identical to SEQ ID NO: 8846

SEQ ID NO: 45766 - DNA, 18 bp, Homo Sapiens
cagcggaagcgtgctggg

SEQ ID NO: 45767 - DNA, 19 bp, Homo Sapiens
cagcggaagcgtgctgggc

SEQ ID NO: 45768 - DNA, 20 bp, Homo Sapiens
cagcggaagcgtgctgggcc

SEQ ID NO: 45769 - DNA, 21 bp, Homo Sapiens
cagcggaagcgtgctgggccc

SEQ ID NO: 45770 - DNA, 22 bp, Homo Sapiens
cagcggaagcgtgctgggccca

SEQ ID NO: 45771 - DNA, 28 bp, Homo Sapiens
cagcggaagcgtgctgggcccataaccc

SEQ ID NO: 45772 - DNA, 31 bp, Homo Sapiens; identical to SEQ ID NO: 8858

SEQ ID NO: 45773 - DNA, 37 bp, Homo Sapiens
cagcggaagcgtgctgggcccataacccagaggtcga

SEQ ID NO: 45774 - DNA, 23 bp, Homo Sapiens
cagctaaataagctatcgggccc

SEQ ID NO: 45775 - DNA, 24 bp, Homo Sapiens
cagctaaataagctatcgggccca

SEQ ID NO: 45776 - DNA, 16 bp, Homo Sapiens
cagctatccattggtc

SEQ ID NO: 45777 - DNA, 17 bp, Homo Sapiens
cagctatccattggtct

SEQ ID NO: 45778 - DNA, 21 bp, Homo Sapiens
cagcttcaaacctgccggggc

SEQ ID NO: 45779 - DNA, 24 bp, Homo Sapiens
cagcttcaaacctgccggggcttc

SEQ ID NO: 45780 - DNA, 25 bp, Homo Sapiens
cagcttcaaacctgccggggcttcc

SEQ ID NO: 45781 - DNA, 21 bp, Homo Sapiens
cagctttggggggttcgattc

SEQ ID NO: 45782 - DNA, 36 bp, Homo Sapiens; identical to SEQ ID NO: 8927

SEQ ID NO: 45783 - DNA, 18 bp, Homo Sapiens
caggagatcctgggttcg

SEQ ID NO: 45784 - DNA, 32 bp, Homo Sapiens; identical to SEQ ID NO: 8939

SEQ ID NO: 45785 - DNA, 34 bp, Homo Sapiens; identical to SEQ ID NO: 8941

SEQ ID NO: 45786 - DNA, 35 bp, Homo Sapiens; identical to SEQ ID NO: 8942

SEQ ID NO: 45787 - DNA, 36 bp, Homo Sapiens; identical to SEQ ID NO: 8943

SEQ ID NO: 45788 - DNA, 37 bp, Homo Sapiens; identical to SEQ ID NO: 8944

SEQ ID NO: 45789 - DNA, 31 bp, Homo Sapiens; identical to SEQ ID NO: 8946

SEQ ID NO: 45790 - DNA, 32 bp, Homo Sapiens; identical to SEQ ID NO: 8947

SEQ ID NO: 45791 - DNA, 33 bp, Homo Sapiens; identical to SEQ ID NO: 8948

SEQ ID NO: 45792 - DNA, 34 bp, Homo Sapiens; identical to SEQ ID NO: 8949

SEQ ID NO: 45793 - DNA, 35 bp, Homo Sapiens; identical to SEQ ID NO: 8950

SEQ ID NO: 45794 - DNA, 36 bp, Homo Sapiens; identical to SEQ ID NO: 8951

SEQ ID NO: 45795 - DNA, 16 bp, Homo Sapiens
caggatggccgagcgg

SEQ ID NO: 45796 - DNA, 20 bp, Homo Sapiens
caggatggccgagcggtcta

SEQ ID NO: 45797 - DNA, 22 bp, Homo Sapiens
caggatggccgagcggtctaag

SEQ ID NO: 45798 - DNA, 24 bp, Homo Sapiens
caggatggccgagcggtctaaggc

SEQ ID NO: 45799 - DNA, 30 bp, Homo Sapiens; identical to SEQ ID NO: 8970

SEQ ID NO: 45800 - DNA, 33 bp, Homo Sapiens; identical to SEQ ID NO: 8973

SEQ ID NO: 45801 - DNA, 22 bp, Homo Sapiens
caggatggccgagtggtctaag

SEQ ID NO: 45802 - DNA, 24 bp, Homo Sapiens
caggatggccgagtggtctaaggc

SEQ ID NO: 45803 - DNA, 23 bp, Homo Sapiens
caggatggccgagtggttaaggc

SEQ ID NO: 45804 - DNA, 19 bp, Homo Sapiens
caggcggcccgggttcgac

SEQ ID NO: 45805 - DNA, 21 bp, Homo Sapiens
caggcggcccgggttcgactc

SEQ ID NO: 45806 - DNA, 22 bp, Homo Sapiens
caggcggcccgggttcgactcc

SEQ ID NO: 45807 - DNA, 23 bp, Homo Sapiens
caggcggcccgggttcgactccc

SEQ ID NO: 45808 - DNA, 25 bp, Homo Sapiens
caggcggcccgggttcgactcccgg

SEQ ID NO: 45809 - DNA, 26 bp, Homo Sapiens
caggcggcccgggttcgactcccggt

SEQ ID NO: 45810 - DNA, 27 bp, Homo Sapiens
caggcggcccgggttcgactcccggtg

SEQ ID NO: 45811 - DNA, 28 bp, Homo Sapiens
caggcggcccgggttcgactcccggtgt

SEQ ID NO: 45812 - DNA, 29 bp, Homo Sapiens
caggcggcccgggttcgactcccggtgtg

SEQ ID NO: 45813 - DNA, 30 bp, Homo Sapiens; identical to SEQ ID NO: 9004

SEQ ID NO: 45814 - DNA, 31 bp, Homo Sapiens; identical to SEQ ID NO: 9005

SEQ ID NO: 45815 - DNA, 32 bp, Homo Sapiens; identical to SEQ ID NO: 9006

SEQ ID NO: 45816 - DNA, 33 bp, Homo Sapiens; identical to SEQ ID NO: 9007

SEQ ID NO: 45817 - DNA, 34 bp, Homo Sapiens; identical to SEQ ID NO: 9008

SEQ ID NO: 45818 - DNA, 35 bp, Homo Sapiens; identical to SEQ ID NO: 9009

SEQ ID NO: 45819 - DNA, 36 bp, Homo Sapiens; identical to SEQ ID NO: 9010

SEQ ID NO: 45820 - DNA, 36 bp, Homo Sapiens; identical to SEQ ID NO: 9032

SEQ ID NO: 45821 - DNA, 35 bp, Homo Sapiens; identical to SEQ ID NO: 9035

SEQ ID NO: 45822 - DNA, 35 bp, Homo Sapiens; identical to SEQ ID NO: 9039

SEQ ID NO: 45823 - DNA, 36 bp, Homo Sapiens; identical to SEQ ID NO: 9040

SEQ ID NO: 45824 - DNA, 34 bp, Homo Sapiens; identical to SEQ ID NO: 9046

SEQ ID NO: 45825 - DNA, 35 bp, Homo Sapiens; identical to SEQ ID NO: 9047

SEQ ID NO: 45826 - DNA, 36 bp, Homo Sapiens; identical to SEQ ID NO: 9048

SEQ ID NO: 45827 - DNA, 34 bp, Homo Sapiens; identical to SEQ ID NO: 9059

SEQ ID NO: 45828 - DNA, 26 bp, Homo Sapiens
caggggttaggcctctttttaccacc

SEQ ID NO: 45829 - DNA, 31 bp, Homo Sapiens; identical to SEQ ID NO: 9085

SEQ ID NO: 45830 - DNA, 33 bp, Homo Sapiens; identical to SEQ ID NO: 9087

SEQ ID NO: 45831 - DNA, 34 bp, Homo Sapiens; identical to SEQ ID NO: 9088

SEQ ID NO: 45832 - DNA, 35 bp, Homo Sapiens; identical to SEQ ID NO: 9089

SEQ ID NO: 45833 - DNA, 24 bp, Homo Sapiens
cagggttcaagtccctgttcgggc

SEQ ID NO: 45834 - DNA, 25 bp, Homo Sapiens
cagggttcaagtccctgttcgggcg

SEQ ID NO: 45835 - DNA, 26 bp, Homo Sapiens
cagggttcaagtccctgttcgggcgc

SEQ ID NO: 45836 - DNA, 27 bp, Homo Sapiens
cagggttcaagtccctgttcgggcgcc

SEQ ID NO: 45837 - DNA, 28 bp, Homo Sapiens
cagggttcaagtccctgttcgggcgcca

SEQ ID NO: 45838 - DNA, 16 bp, Homo Sapiens
caggtcgcagtctccc

SEQ ID NO: 45839 - DNA, 32 bp, Homo Sapiens; identical to SEQ ID NO: 9100

SEQ ID NO: 45840 - DNA, 33 bp, Homo Sapiens; identical to SEQ ID NO: 9101

SEQ ID NO: 45841 - DNA, 34 bp, Homo Sapiens; identical to SEQ ID NO: 9102

SEQ ID NO: 45842 - DNA, 35 bp, Homo Sapiens; identical to SEQ ID NO: 9103

SEQ ID NO: 45843 - DNA, 36 bp, Homo Sapiens; identical to SEQ ID NO: 9104

SEQ ID NO: 45844 - DNA, 26 bp, Homo Sapiens
caggttcgaaccctgctcgctgcgcc

SEQ ID NO: 45845 - DNA, 26 bp, Homo Sapiens
caggttcgaatcctgccgactacgcc

SEQ ID NO: 45846 - DNA, 24 bp, Homo Sapiens
caggttcgaatcctgttcgtgacg

SEQ ID NO: 45847 - DNA, 25 bp, Homo Sapiens
caggttcgaatcctgttcgtgacgc

SEQ ID NO: 45848 - DNA, 26 bp, Homo Sapiens
caggttcgaatcctgttcgtgacgcc

SEQ ID NO: 45849 - DNA, 24 bp, Homo Sapiens
caggttcgactcctggctggctcg

SEQ ID NO: 45850 - DNA, 26 bp, Homo Sapiens
caggttcgactcctggctggctcgcc

SEQ ID NO: 45851 - DNA, 26 bp, Homo Sapiens
cagtaagttgcaatacttaatttctg

SEQ ID NO: 45852 - DNA, 29 bp, Homo Sapiens
cagtaagttgcaatacttaatttctgcca

SEQ ID NO: 45853 - DNA, 16 bp, Homo Sapiens
cagtcagtagagcatc

SEQ ID NO: 45854 - DNA, 16 bp, Homo Sapiens
cagtcggtagagcata

SEQ ID NO: 45855 - DNA, 16 bp, Homo Sapiens
cagtcggtagagcatc

SEQ ID NO: 45856 - DNA, 17 bp, Homo Sapiens
cagtcggtagagcatca

SEQ ID NO: 45857 - DNA, 18 bp, Homo Sapiens
cagtcggtagagcatcag

SEQ ID NO: 45858 - DNA, 19 bp, Homo Sapiens
cagtcggtagagcatcaga

SEQ ID NO: 45859 - DNA, 20 bp, Homo Sapiens
cagtcggtagagcatcagac

SEQ ID NO: 45860 - DNA, 21 bp, Homo Sapiens
cagtcggtagagcatcagact

SEQ ID NO: 45861 - DNA, 23 bp, Homo Sapiens
cagtcggtagagcatcagacttt

SEQ ID NO: 45862 - DNA, 24 bp, Homo Sapiens
cagtcggtagagcatcagactttt

SEQ ID NO: 45863 - DNA, 16 bp, Homo Sapiens
cagtcggtagagcatg

SEQ ID NO: 45864 - DNA, 17 bp, Homo Sapiens
cagtcggtagagcatga

SEQ ID NO: 45865 - DNA, 18 bp, Homo Sapiens
cagtcggtagagcatgag

SEQ ID NO: 45866 - DNA, 19 bp, Homo Sapiens
cagtcggtagagcatgaga

SEQ ID NO: 45867 - DNA, 20 bp, Homo Sapiens
cagtcggtagagcatgagac

SEQ ID NO: 45868 - DNA, 21 bp, Homo Sapiens
cagtcggtagagcatgagacc

SEQ ID NO: 45869 - DNA, 30 bp, Homo Sapiens; identical to SEQ ID NO: 9182

SEQ ID NO: 45870 - DNA, 21 bp, Homo Sapiens
cagtcggtagagcatgagact

SEQ ID NO: 45871 - DNA, 22 bp, Homo Sapiens
cagtcggtagagcatgagactc

SEQ ID NO: 45872 - DNA, 27 bp, Homo Sapiens
cagtcggtagagcatgagactcttaat

SEQ ID NO: 45873 - DNA, 28 bp, Homo Sapiens
cagtcggtagagcatgagactcttaatc

SEQ ID NO: 45874 - DNA, 29 bp, Homo Sapiens
cagtcggtagagcatgagactcttaatct

SEQ ID NO: 45875 - DNA, 30 bp, Homo Sapiens; identical to SEQ ID NO: 9193

SEQ ID NO: 45876 - DNA, 31 bp, Homo Sapiens; identical to SEQ ID NO: 9194

SEQ ID NO: 45877 - DNA, 40 bp, Homo Sapiens; identical to SEQ ID NO: 9198

SEQ ID NO: 45878 - DNA, 43 bp, Homo Sapiens; identical to SEQ ID NO: 9201

SEQ ID NO: 45879 - DNA, 17 bp, Homo Sapiens
cagtcggtagagcatgg

SEQ ID NO: 45880 - DNA, 18 bp, Homo Sapiens
cagtcggtagagcatggg

SEQ ID NO: 45881 - DNA, 19 bp, Homo Sapiens
cagtcggtagagcatggga

SEQ ID NO: 45882 - DNA, 20 bp, Homo Sapiens
cagtcggtagagcatgggac

SEQ ID NO: 45883 - DNA, 21 bp, Homo Sapiens
cagtcggtagagcatgggact

SEQ ID NO: 45884 - DNA, 22 bp, Homo Sapiens
cagtcggtagagcatgggactc

SEQ ID NO: 45885 - DNA, 23 bp, Homo Sapiens
cagtcggtagagcatgggactct

SEQ ID NO: 45886 - DNA, 27 bp, Homo Sapiens
cagtcggtagagcatgggactcttaat

SEQ ID NO: 45887 - DNA, 28 bp, Homo Sapiens
cagtcggtagagcatgggactcttaatc

SEQ ID NO: 45888 - DNA, 29 bp, Homo Sapiens
cagtcggtagagcatgggactcttaatcc

SEQ ID NO: 45889 - DNA, 30 bp, Homo Sapiens; identical to SEQ ID NO: 9217

SEQ ID NO: 45890 - DNA, 31 bp, Homo Sapiens; identical to SEQ ID NO: 9218

SEQ ID NO: 45891 - DNA, 38 bp, Homo Sapiens; identical to SEQ ID NO: 9220

SEQ ID NO: 45892 - DNA, 39 bp, Homo Sapiens; identical to SEQ ID NO: 9221

SEQ ID NO: 45893 - DNA, 40 bp, Homo Sapiens; identical to SEQ ID NO: 9222

SEQ ID NO: 45894 - DNA, 42 bp, Homo Sapiens; identical to SEQ ID NO: 9224

SEQ ID NO: 45895 - DNA, 43 bp, Homo Sapiens; identical to SEQ ID NO: 9225

SEQ ID NO: 45896 - DNA, 24 bp, Homo Sapiens
cagtctcataatctgaaggtcctg

SEQ ID NO: 45897 - DNA, 23 bp, Homo Sapiens
cagtctcccctggaggcgtgggt

SEQ ID NO: 45898 - DNA, 43 bp, Homo Sapiens; identical to SEQ ID NO: 9261

SEQ ID NO: 45899 - DNA, 29 bp, Homo Sapiens
cagtggcctaatggataaggcatcagcct

SEQ ID NO: 45900 - DNA, 31 bp, Homo Sapiens; identical to SEQ ID NO: 9270

SEQ ID NO: 45901 - DNA, 16 bp, Homo Sapiens
cagtgggtagagcatc

SEQ ID NO: 45902 - DNA, 16 bp, Homo Sapiens
cagtggtagaattctc

SEQ ID NO: 45903 - DNA, 17 bp, Homo Sapiens
cagtggtagaattctcg

SEQ ID NO: 45904 - DNA, 18 bp, Homo Sapiens
cagtggtagaattctcgc

SEQ ID NO: 45905 - DNA, 19 bp, Homo Sapiens
cagtggtagaattctcgcc

SEQ ID NO: 45906 - DNA, 20 bp, Homo Sapiens
cagtggtagaattctcgcct

SEQ ID NO: 45907 - DNA, 21 bp, Homo Sapiens
cagtggtagaattctcgcctg

SEQ ID NO: 45908 - DNA, 22 bp, Homo Sapiens
cagtggtagaattctcgcctgc

SEQ ID NO: 45909 - DNA, 23 bp, Homo Sapiens
cagtggtagaattctcgcctgcc

SEQ ID NO: 45910 - DNA, 24 bp, Homo Sapiens
cagtggtagaattctcgcctgcca

SEQ ID NO: 45911 - DNA, 25 bp, Homo Sapiens
cagtggtagaattctcgcctgccac

SEQ ID NO: 45912 - DNA, 27 bp, Homo Sapiens
cagtggtagaattctcgcctgccacgc

SEQ ID NO: 45913 - DNA, 31 bp, Homo Sapiens; identical to SEQ ID NO: 9295

SEQ ID NO: 45914 - DNA, 35 bp, Homo Sapiens; identical to SEQ ID NO: 9298

SEQ ID NO: 45915 - DNA, 36 bp, Homo Sapiens; identical to SEQ ID NO: 9299

SEQ ID NO: 45916 - DNA, 39 bp, Homo Sapiens; identical to SEQ ID NO: 9301

SEQ ID NO: 45917 - DNA, 40 bp, Homo Sapiens; identical to SEQ ID NO: 9302

SEQ ID NO: 45918 - DNA, 20 bp, Homo Sapiens
cagtggtagagcatttgact

SEQ ID NO: 45919 - DNA, 22 bp, Homo Sapiens
cagtggtagagcatttgactgc

SEQ ID NO: 45920 - DNA, 16 bp, Homo Sapiens
cagtggtagagcgcat

SEQ ID NO: 45921 - DNA, 18 bp, Homo Sapiens
cagtggtagagcgcgtgc

SEQ ID NO: 45922 - DNA, 21 bp, Homo Sapiens
cagtggtagagcgcgtgcttc

SEQ ID NO: 45923 - DNA, 24 bp, Homo Sapiens
cagttgacccgggttcgattcccg

SEQ ID NO: 45924 - DNA, 29 bp, Homo Sapiens
cagttgacccgggttcgattcccggccaa

SEQ ID NO: 45925 - DNA, 35 bp, Homo Sapiens; identical to SEQ ID NO: 9330

SEQ ID NO: 45926 - DNA, 35 bp, Homo Sapiens; identical to SEQ ID NO: 9344

SEQ ID NO: 45927 - DNA, 36 bp, Homo Sapiens; identical to SEQ ID NO: 9345

SEQ ID NO: 45928 - DNA, 16 bp, Homo Sapiens
cagttggtagagcatc

SEQ ID NO: 45929 - DNA, 28 bp, Homo Sapiens
cataaaacttaaaactttacagtcagag

SEQ ID NO: 45930 - DNA, 21 bp, Homo Sapiens
cataacccagaggtcgatgga

SEQ ID NO: 45931 - DNA, 22 bp, Homo Sapiens
cataacccagaggtcgatggat

SEQ ID NO: 45932 - DNA, 23 bp, Homo Sapiens
cataacccagaggtcgatggatc

SEQ ID NO: 45933 - DNA, 24 bp, Homo Sapiens
cataacccagaggtcgatggatcg

SEQ ID NO: 45934 - DNA, 28 bp, Homo Sapiens
cataacccagaggtcgatggatcgaaac

SEQ ID NO: 45935 - DNA, 29 bp, Homo Sapiens
cataacccagaggtcgatggatcgaaacc

SEQ ID NO: 45936 - DNA, 30 bp, Homo Sapiens
cataacccagaggtcgatggatcgaaacca

SEQ ID NO: 45937 - DNA, 30 bp, Homo Sapiens; identical to SEQ ID NO: 9394

SEQ ID NO: 45938 - DNA, 16 bp, Homo Sapiens
cataatctgaaggtcc

SEQ ID NO: 45939 - DNA, 17 bp, Homo Sapiens
cataatctgaaggtcct

SEQ ID NO: 45940 - DNA, 18 bp, Homo Sapiens
cataatctgaaggtcctg

SEQ ID NO: 45941 - DNA, 19 bp, Homo Sapiens
cataatctgaaggtcctga

SEQ ID NO: 45942 - DNA, 21 bp, Homo Sapiens
cataatctgaaggtcctgagt

SEQ ID NO: 45943 - DNA, 22 bp, Homo Sapiens
cataatctgaaggtcctgagtt

SEQ ID NO: 45944 - DNA, 29 bp, Homo Sapiens
cataatctgaaggtcctgagttcgaacct

SEQ ID NO: 45945 - DNA, 30 bp, Homo Sapiens; identical to SEQ ID NO: 9408

SEQ ID NO: 45946 - DNA, 42 bp, Homo Sapiens; identical to SEQ ID NO: 9415

SEQ ID NO: 45947 - DNA, 43 bp, Homo Sapiens; identical to SEQ ID NO: 9416

SEQ ID NO: 45948 - DNA, 18 bp, Homo Sapiens
cataatctgaaggtcgtg

SEQ ID NO: 45949 - DNA, 20 bp, Homo Sapiens
cataatctgaaggtcgtgag

SEQ ID NO: 45950 - DNA, 21 bp, Homo Sapiens
cataatctgaaggtcgtgagt

SEQ ID NO: 45951 - DNA, 41 bp, Homo Sapiens; identical to SEQ ID NO: 9430

SEQ ID NO: 45952 - DNA, 42 bp, Homo Sapiens; identical to SEQ ID NO: 9431

SEQ ID NO: 45953 - DNA, 43 bp, Homo Sapiens; identical to SEQ ID NO: 9432

SEQ ID NO: 45954 - DNA, 42 bp, Homo Sapiens; identical to SEQ ID NO: 9435

SEQ ID NO: 45955 - DNA, 43 bp, Homo Sapiens; identical to SEQ ID NO: 9436

SEQ ID NO: 45956 - DNA, 41 bp, Homo Sapiens; identical to SEQ ID NO: 9443

SEQ ID NO: 45957 - DNA, 28 bp, Homo Sapiens
catagtgtagtggttatcacgtctgctt

SEQ ID NO: 45958 - DNA, 31 bp, Homo Sapiens; identical to SEQ ID NO: 9467

SEQ ID NO: 45959 - DNA, 32 bp, Homo Sapiens; identical to SEQ ID NO: 9468

SEQ ID NO: 45960 - DNA, 34 bp, Homo Sapiens; identical to SEQ ID NO: 9470

SEQ ID NO: 45961 - DNA, 35 bp, Homo Sapiens; identical to SEQ ID NO: 9471

SEQ ID NO: 45962 - DNA, 36 bp, Homo Sapiens; identical to SEQ ID NO: 9472

SEQ ID NO: 45963 - DNA, 37 bp, Homo Sapiens; identical to SEQ ID NO: 9473

SEQ ID NO: 45964 - DNA, 39 bp, Homo Sapiens; identical to SEQ ID NO: 9475

SEQ ID NO: 45965 - DNA, 40 bp, Homo Sapiens; identical to SEQ ID NO: 9476

SEQ ID NO: 45966 - DNA, 25 bp, Homo Sapiens
catatggtctagcggttaggattcc

SEQ ID NO: 45967 - DNA, 29 bp, Homo Sapiens
catatggtctagcggttaggattcctggt

SEQ ID NO: 45968 - DNA, 30 bp, Homo Sapiens; identical to SEQ ID NO: 9484

SEQ ID NO: 45969 - DNA, 31 bp, Homo Sapiens; identical to SEQ ID NO: 9485

SEQ ID NO: 45970 - DNA, 32 bp, Homo Sapiens; identical to SEQ ID NO: 9486

SEQ ID NO: 45971 - DNA, 33 bp, Homo Sapiens; identical to SEQ ID NO: 9487

SEQ ID NO: 45972 - DNA, 18 bp, Homo Sapiens
catcaccccataaacacc

SEQ ID NO: 45973 - DNA, 19 bp, Homo Sapiens
catcaccccataaacacca

SEQ ID NO: 45974 - DNA, 16 bp, Homo Sapiens
catcagattgtgaatc

SEQ ID NO: 45975 - DNA, 17 bp, Homo Sapiens
catcagattgtgaatct

SEQ ID NO: 45976 - DNA, 29 bp, Homo Sapiens
catcagattgtgaatctgacaacagaggc

SEQ ID NO: 45977 - DNA, 30 bp, Homo Sapiens; identical to SEQ ID NO: 9532

SEQ ID NO: 45978 - DNA, 37 bp, Homo Sapiens; identical to SEQ ID NO: 9539

SEQ ID NO: 45979 - DNA, 26 bp, Homo Sapiens
catcagcctccggagctggggattgt

SEQ ID NO: 45980 - DNA, 16 bp, Homo Sapiens
catgagactcttaatc

SEQ ID NO: 45981 - DNA, 17 bp, Homo Sapiens
catgagactcttaatct

SEQ ID NO: 45982 - DNA, 34 bp, Homo Sapiens; identical to SEQ ID NO: 34451

SEQ ID NO: 45983 - DNA, 35 bp, Homo Sapiens; identical to SEQ ID NO: 9558

SEQ ID NO: 45984 - DNA, 36 bp, Homo Sapiens; identical to SEQ ID NO: 9559

SEQ ID NO: 45985 - DNA, 26 bp, Homo Sapiens
catgcccccatgtctaacaacatggc

SEQ ID NO: 45986 - DNA, 27 bp, Homo Sapiens
catgcccccatgtctaacaacatggct

SEQ ID NO: 45987 - DNA, 28 bp, Homo Sapiens
catgcccccatgtctaacaacatggctt

SEQ ID NO: 45988 - DNA, 33 bp, Homo Sapiens; identical to SEQ ID NO: 9582

SEQ ID NO: 45989 - DNA, 35 bp, Homo Sapiens; identical to SEQ ID NO: 9584

SEQ ID NO: 45990 - DNA, 36 bp, Homo Sapiens; identical to SEQ ID NO: 9585

SEQ ID NO: 45991 - DNA, 16 bp, Homo Sapiens
catgggactcttaatc

SEQ ID NO: 45992 - DNA, 17 bp, Homo Sapiens
catgggactcttaatcc

SEQ ID NO: 45993 - DNA, 17 bp, Homo Sapiens
catgggactcttcatcc

SEQ ID NO: 45994 - DNA, 29 bp, Homo Sapiens
catgggtggttcagtggtagaattctcgc

SEQ ID NO: 45995 - DNA, 30 bp, Homo Sapiens; identical to SEQ ID NO: 9620

SEQ ID NO: 45996 - DNA, 31 bp, Homo Sapiens; identical to SEQ ID NO: 9621

SEQ ID NO: 45997 - DNA, 32 bp, Homo Sapiens; identical to SEQ ID NO: 9622

SEQ ID NO: 45998 - DNA, 34 bp, Homo Sapiens; identical to SEQ ID NO: 9624

SEQ ID NO: 45999 - DNA, 35 bp, Homo Sapiens; identical to SEQ ID NO: 9625

SEQ ID NO: 46000 - DNA, 21 bp, Homo Sapiens
catggtctagcggttaggatt

SEQ ID NO: 46001 - DNA, 23 bp, Homo Sapiens
catggtctagcggttaggattcc

SEQ ID NO: 46002 - DNA, 24 bp, Homo Sapiens
catggtctagcggttaggattcct

SEQ ID NO: 46003 - DNA, 25 bp, Homo Sapiens
catggtctagcggttaggattcctg

SEQ ID NO: 46004 - DNA, 26 bp, Homo Sapiens
catggtctagcggttaggattcctgg

SEQ ID NO: 46005 - DNA, 27 bp, Homo Sapiens
catggtctagcggttaggattcctggt

SEQ ID NO: 46006 - DNA, 28 bp, Homo Sapiens
catggtctagcggttaggattcctggtt

SEQ ID NO: 46007 - DNA, 30 bp, Homo Sapiens; identical to SEQ ID NO: 9642

SEQ ID NO: 46008 - DNA, 31 bp, Homo Sapiens; identical to SEQ ID NO: 9643

SEQ ID NO: 46009 - DNA, 28 bp, Homo Sapiens
catggtgtaatggttagcactctggact

SEQ ID NO: 46010 - DNA, 31 bp, Homo Sapiens; identical to SEQ ID NO: 9656

SEQ ID NO: 46011 - DNA, 16 bp, Homo Sapiens
cattcttgcgacccgg

SEQ ID NO: 46012 - DNA, 17 bp, Homo Sapiens
cattcttgcgacccggg

SEQ ID NO: 46013 - DNA, 18 bp, Homo Sapiens
cattcttgcgacccgggt

SEQ ID NO: 46014 - DNA, 19 bp, Homo Sapiens
cattcttgcgacccgggtt

SEQ ID NO: 46015 - DNA, 20 bp, Homo Sapiens
cattcttgcgacccgggttc

SEQ ID NO: 46016 - DNA, 21 bp, Homo Sapiens
cattcttgcgacccgggttcg

SEQ ID NO: 46017 - DNA, 22 bp, Homo Sapiens
cattcttgcgacccgggttcga

SEQ ID NO: 46018 - DNA, 34 bp, Homo Sapiens; identical to SEQ ID NO: 9708

SEQ ID NO: 46019 - DNA, 35 bp, Homo Sapiens; identical to SEQ ID NO: 9709

SEQ ID NO: 46020 - DNA, 39 bp, Homo Sapiens; identical to SEQ ID NO: 9713

SEQ ID NO: 46021 - DNA, 40 bp, Homo Sapiens; identical to SEQ ID NO: 9714

SEQ ID NO: 46022 - DNA, 36 bp, Homo Sapiens; identical to SEQ ID NO: 9725

SEQ ID NO: 46023 - DNA, 37 bp, Homo Sapiens; identical to SEQ ID NO: 9726

SEQ ID NO: 46024 - DNA, 23 bp, Homo Sapiens
cattggggtttccccgcgcaggt

SEQ ID NO: 46025 - DNA, 17 bp, Homo Sapiens
cattggtcgtggttgta

SEQ ID NO: 46026 - DNA, 18 bp, Homo Sapiens
cattggtcgtggttgtag

SEQ ID NO: 46027 - DNA, 19 bp, Homo Sapiens
cattggtcgtggttgtagt

SEQ ID NO: 46028 - DNA, 21 bp, Homo Sapiens
cattggtcgtggttgtagtcc

SEQ ID NO: 46029 - DNA, 25 bp, Homo Sapiens
cattggtcgtggttgtagtccgtgc

SEQ ID NO: 46030 - DNA, 26 bp, Homo Sapiens
cattggtcgtggttgtagtccgtgcg

SEQ ID NO: 46031 - DNA, 27 bp, Homo Sapiens
cattggtcgtggttgtagtccgtgcga

SEQ ID NO: 46032 - DNA, 28 bp, Homo Sapiens
cattggtcgtggttgtagtccgtgcgag

SEQ ID NO: 46033 - DNA, 29 bp, Homo Sapiens
cattggtcgtggttgtagtccgtgcgaga

SEQ ID NO: 46034 - DNA, 30 bp, Homo Sapiens; identical to SEQ ID NO: 9763

SEQ ID NO: 46035 - DNA, 31 bp, Homo Sapiens; identical to SEQ ID NO: 9764

SEQ ID NO: 46036 - DNA, 32 bp, Homo Sapiens; identical to SEQ ID NO: 9765

SEQ ID NO: 46037 - DNA, 33 bp, Homo Sapiens; identical to SEQ ID NO: 9766

SEQ ID NO: 46038 - DNA, 34 bp, Homo Sapiens; identical to SEQ ID NO: 9767

SEQ ID NO: 46039 - DNA, 35 bp, Homo Sapiens; identical to SEQ ID NO: 9768

SEQ ID NO: 46040 - DNA, 17 bp, Homo Sapiens
cattggtggttcagtgg

SEQ ID NO: 46041 - DNA, 27 bp, Homo Sapiens
cattggtggttcagtggtagaattctc

SEQ ID NO: 46042 - DNA, 28 bp, Homo Sapiens
cattggtggttcagtggtagaattctcg

SEQ ID NO: 46043 - DNA, 29 bp, Homo Sapiens
cattggtggttcagtggtagaattctcgc

SEQ ID NO: 46044 - DNA, 30 bp, Homo Sapiens; identical to SEQ ID NO: 9797

SEQ ID NO: 46045 - DNA, 31 bp, Homo Sapiens; identical to SEQ ID NO: 9798

SEQ ID NO: 46046 - DNA, 32 bp, Homo Sapiens; identical to SEQ ID NO: 9804

SEQ ID NO: 46047 - DNA, 33 bp, Homo Sapiens; identical to SEQ ID NO: 9805

SEQ ID NO: 46048 - DNA, 34 bp, Homo Sapiens; identical to SEQ ID NO: 9806

SEQ ID NO: 46049 - DNA, 35 bp, Homo Sapiens; identical to SEQ ID NO: 9807

SEQ ID NO: 46050 - DNA, 47 bp, Homo Sapiens; identical to SEQ ID NO: 9814

SEQ ID NO: 46051 - DNA, 43 bp, Homo Sapiens; identical to SEQ ID NO: 9821

SEQ ID NO: 46052 - DNA, 44 bp, Homo Sapiens; identical to SEQ ID NO: 9822

SEQ ID NO: 46053 - DNA, 34 bp, Homo Sapiens; identical to SEQ ID NO: 9833

SEQ ID NO: 46054 - DNA, 35 bp, Homo Sapiens; identical to SEQ ID NO: 9834

SEQ ID NO: 46055 - DNA, 36 bp, Homo Sapiens; identical to SEQ ID NO: 9835

SEQ ID NO: 46056 - DNA, 17 bp, Homo Sapiens
catttgactgcagatca

SEQ ID NO: 46057 - DNA, 25 bp, Homo Sapiens
catttgactgcagatcaagaggtcc

SEQ ID NO: 46058 - DNA, 26 bp, Homo Sapiens
catttgactgcagatcaagaggtccc

SEQ ID NO: 46059 - DNA, 21 bp, Homo Sapiens
ccaaaacatcagattgtgaat

SEQ ID NO: 46060 - DNA, 22 bp, Homo Sapiens
ccaaaacatcagattgtgaatc

SEQ ID NO: 46061 - DNA, 30 bp, Homo Sapiens; identical to SEQ ID NO: 9876

SEQ ID NO: 46062 - DNA, 31 bp, Homo Sapiens; identical to SEQ ID NO: 9877

SEQ ID NO: 46063 - DNA, 32 bp, Homo Sapiens; identical to SEQ ID NO: 9878

SEQ ID NO: 46064 - DNA, 33 bp, Homo Sapiens; identical to SEQ ID NO: 9879

SEQ ID NO: 46065 - DNA, 34 bp, Homo Sapiens; identical to SEQ ID NO: 9880

SEQ ID NO: 46066 - DNA, 35 bp, Homo Sapiens; identical to SEQ ID NO: 9881

SEQ ID NO: 46067 - DNA, 36 bp, Homo Sapiens; identical to SEQ ID NO: 9882

SEQ ID NO: 46068 - DNA, 37 bp, Homo Sapiens; identical to SEQ ID NO: 9883

SEQ ID NO: 46069 - DNA, 42 bp, Homo Sapiens; identical to SEQ ID NO: 9888

SEQ ID NO: 46070 - DNA, 43 bp, Homo Sapiens; identical to SEQ ID NO: 9889

SEQ ID NO: 46071 - DNA, 44 bp, Homo Sapiens; identical to SEQ ID NO: 9890

SEQ ID NO: 46072 - DNA, 45 bp, Homo Sapiens; identical to SEQ ID NO: 9891

SEQ ID NO: 46073 - DNA, 46 bp, Homo Sapiens; identical to SEQ ID NO: 9892

SEQ ID NO: 46074 - DNA, 21 bp, Homo Sapiens
ccaacacctctttacagtgac

SEQ ID NO: 46075 - DNA, 22 bp, Homo Sapiens
ccaacacctctttacagtgacc

SEQ ID NO: 46076 - DNA, 23 bp, Homo Sapiens
ccaacacctctttacagtgacca

SEQ ID NO: 46077 - DNA, 18 bp, Homo Sapiens
ccaacttacacttaggag

SEQ ID NO: 46078 - DNA, 26 bp, Homo Sapiens
ccaacttacacttaggagatttcaac

SEQ ID NO: 46079 - DNA, 27 bp, Homo Sapiens
ccaacttacacttaggagatttcaact

SEQ ID NO: 46080 - DNA, 28 bp, Homo Sapiens
ccaacttacacttaggagatttcaactt

SEQ ID NO: 46081 - DNA, 32 bp, Homo Sapiens; identical to SEQ ID NO: 9920

SEQ ID NO: 46082 - DNA, 37 bp, Homo Sapiens; identical to SEQ ID NO: 9925

SEQ ID NO: 46083 - DNA, 38 bp, Homo Sapiens; identical to SEQ ID NO: 9926

SEQ ID NO: 46084 - DNA, 39 bp, Homo Sapiens; identical to SEQ ID NO: 9927

SEQ ID NO: 46085 - DNA, 40 bp, Homo Sapiens; identical to SEQ ID NO: 9928

SEQ ID NO: 46086 - DNA, 41 bp, Homo Sapiens; identical to SEQ ID NO: 9929

SEQ ID NO: 46087 - DNA, 42 bp, Homo Sapiens; identical to SEQ ID NO: 9930

SEQ ID NO: 46088 - DNA, 43 bp, Homo Sapiens; identical to SEQ ID NO: 9931

SEQ ID NO: 46089 - DNA, 44 bp, Homo Sapiens; identical to SEQ ID NO: 9932

SEQ ID NO: 46090 - DNA, 45 bp, Homo Sapiens; identical to SEQ ID NO: 9933

SEQ ID NO: 46091 - DNA, 46 bp, Homo Sapiens; identical to SEQ ID NO: 9934

SEQ ID NO: 46092 - DNA, 47 bp, Homo Sapiens; identical to SEQ ID NO: 9935

SEQ ID NO: 46093 - DNA, 16 bp, Homo Sapiens
ccaaggtcgcgggttc

SEQ ID NO: 46094 - DNA, 31 bp, Homo Sapiens; identical to SEQ ID NO: 9952

SEQ ID NO: 46095 - DNA, 35 bp, Homo Sapiens; identical to SEQ ID NO: 9956

SEQ ID NO: 46096 - DNA, 36 bp, Homo Sapiens; identical to SEQ ID NO: 9959

SEQ ID NO: 46097 - DNA, 36 bp, Homo Sapiens; identical to SEQ ID NO: 9965

SEQ ID NO: 46098 - DNA, 37 bp, Homo Sapiens; identical to SEQ ID NO: 9966

SEQ ID NO: 46099 - DNA, 38 bp, Homo Sapiens; identical to SEQ ID NO: 9967

SEQ ID NO: 46100 - DNA, 39 bp, Homo Sapiens; identical to SEQ ID NO: 9968

SEQ ID NO: 46101 - DNA, 19 bp, Homo Sapiens
ccaattaactagttttgac

SEQ ID NO: 46102 - DNA, 38 bp, Homo Sapiens; identical to SEQ ID NO: 9974

SEQ ID NO: 46103 - DNA, 39 bp, Homo Sapiens; identical to SEQ ID NO: 9975

SEQ ID NO: 46104 - DNA, 40 bp, Homo Sapiens; identical to SEQ ID NO: 9976

SEQ ID NO: 46105 - DNA, 16 bp, Homo Sapiens
ccacatggtctagcgg

SEQ ID NO: 46106 - DNA, 26 bp, Homo Sapiens
ccacatggtctagcggttaggattcc

SEQ ID NO: 46107 - DNA, 27 bp, Homo Sapiens
ccacatggtctagcggttaggattcct

SEQ ID NO: 46108 - DNA, 28 bp, Homo Sapiens
ccacatggtctagcggttaggattcctg

SEQ ID NO: 46109 - DNA, 30 bp, Homo Sapiens; identical to SEQ ID NO: 9987

SEQ ID NO: 46110 - DNA, 31 bp, Homo Sapiens; identical to SEQ ID NO: 9988

SEQ ID NO: 46111 - DNA, 32 bp, Homo Sapiens; identical to SEQ ID NO: 9989

SEQ ID NO: 46112 - DNA, 33 bp, Homo Sapiens; identical to SEQ ID NO: 9990

SEQ ID NO: 46113 - DNA, 34 bp, Homo Sapiens; identical to SEQ ID NO: 9991

SEQ ID NO: 46114 - DNA, 16 bp, Homo Sapiens
ccacccagggacgcca

SEQ ID NO: 46115 - DNA, 17 bp, Homo Sapiens
ccacgcgggaggcccgg

SEQ ID NO: 46116 - DNA, 19 bp, Homo Sapiens
ccacgcgggaggcccgggt

SEQ ID NO: 46117 - DNA, 20 bp, Homo Sapiens
ccacgcgggaggcccgggtt

SEQ ID NO: 46118 - DNA, 32 bp, Homo Sapiens; identical to SEQ ID NO: 10006

SEQ ID NO: 46119 - DNA, 36 bp, Homo Sapiens; identical to SEQ ID NO: 10009

SEQ ID NO: 46120 - DNA, 37 bp, Homo Sapiens; identical to SEQ ID NO: 10010

SEQ ID NO: 46121 - DNA, 40 bp, Homo Sapiens; identical to SEQ ID NO: 10012

SEQ ID NO: 46122 - DNA, 41 bp, Homo Sapiens; identical to SEQ ID NO: 10013

SEQ ID NO: 46123 - DNA, 40 bp, Homo Sapiens; identical to SEQ ID NO: 10015

SEQ ID NO: 46124 - DNA, 41 bp, Homo Sapiens; identical to SEQ ID NO: 10016

SEQ ID NO: 46125 - DNA, 16 bp, Homo Sapiens
ccagaggtcgatggat

SEQ ID NO: 46126 - DNA, 18 bp, Homo Sapiens
ccagaggtcgatggatcg

SEQ ID NO: 46127 - DNA, 23 bp, Homo Sapiens
ccagaggtcgatggatcgaaacc

SEQ ID NO: 46128 - DNA, 17 bp, Homo Sapiens
ccagatcagaaggctgc

SEQ ID NO: 46129 - DNA, 16 bp, Homo Sapiens
ccagcgatccgagttc

SEQ ID NO: 46130 - DNA, 34 bp, Homo Sapiens; identical to SEQ ID NO: 10089

SEQ ID NO: 46131 - DNA, 35 bp, Homo Sapiens; identical to SEQ ID NO: 10090

SEQ ID NO: 46132 - DNA, 36 bp, Homo Sapiens; identical to SEQ ID NO: 10091

SEQ ID NO: 46133 - DNA, 34 bp, Homo Sapiens; identical to SEQ ID NO: 10095

SEQ ID NO: 46134 - DNA, 34 bp, Homo Sapiens; identical to SEQ ID NO: 10101

SEQ ID NO: 46135 - DNA, 21 bp, Homo Sapiens
ccaggcggcccgggttcgact

SEQ ID NO: 46136 - DNA, 26 bp, Homo Sapiens
ccaggcggcccgggttcgactcccgg

SEQ ID NO: 46137 - DNA, 27 bp, Homo Sapiens
ccaggcggcccgggttcgactcccggt

SEQ ID NO: 46138 - DNA, 28 bp, Homo Sapiens
ccaggcggcccgggttcgactcccggtg

SEQ ID NO: 46139 - DNA, 29 bp, Homo Sapiens
ccaggcggcccgggttcgactcccggtgt

SEQ ID NO: 46140 - DNA, 30 bp, Homo Sapiens; identical to SEQ ID NO: 10129

SEQ ID NO: 46141 - DNA, 31 bp, Homo Sapiens; identical to SEQ ID NO: 10130

SEQ ID NO: 46142 - DNA, 32 bp, Homo Sapiens; identical to SEQ ID NO: 10131

SEQ ID NO: 46143 - DNA, 33 bp, Homo Sapiens; identical to SEQ ID NO: 10132

SEQ ID NO: 46144 - DNA, 34 bp, Homo Sapiens; identical to SEQ ID NO: 10133

SEQ ID NO: 46145 - DNA, 35 bp, Homo Sapiens; identical to SEQ ID NO: 10134

SEQ ID NO: 46146 - DNA, 36 bp, Homo Sapiens; identical to SEQ ID NO: 10135

SEQ ID NO: 46147 - DNA, 37 bp, Homo Sapiens; identical to SEQ ID NO: 10136

SEQ ID NO: 46148 - DNA, 36 bp, Homo Sapiens; identical to SEQ ID NO: 10143

SEQ ID NO: 46149 - DNA, 36 bp, Homo Sapiens; identical to SEQ ID NO: 10144

SEQ ID NO: 46150 - DNA, 35 bp, Homo Sapiens; identical to SEQ ID NO: 10148

SEQ ID NO: 46151 - DNA, 36 bp, Homo Sapiens; identical to SEQ ID NO: 10149

SEQ ID NO: 46152 - DNA, 34 bp, Homo Sapiens; identical to SEQ ID NO: 10156

SEQ ID NO: 46153 - DNA, 35 bp, Homo Sapiens; identical to SEQ ID NO: 10157

SEQ ID NO: 46154 - DNA, 36 bp, Homo Sapiens; identical to SEQ ID NO: 10158

SEQ ID NO: 46155 - DNA, 25 bp, Homo Sapiens
ccagggttcaagtccctgttcgggc

SEQ ID NO: 46156 - DNA, 26 bp, Homo Sapiens
ccagggttcaagtccctgttcgggcg

SEQ ID NO: 46157 - DNA, 27 bp, Homo Sapiens
ccagggttcaagtccctgttcgggcgc

SEQ ID NO: 46158 - DNA, 28 bp, Homo Sapiens
ccagggttcaagtccctgttcgggcgcc

SEQ ID NO: 46159 - DNA, 29 bp, Homo Sapiens
ccagggttcaagtccctgttcgggcgcca

SEQ ID NO: 46160 - DNA, 34 bp, Homo Sapiens; identical to SEQ ID NO: 10191

SEQ ID NO: 46161 - DNA, 35 bp, Homo Sapiens; identical to SEQ ID NO: 10192

SEQ ID NO: 46162 - DNA, 36 bp, Homo Sapiens; identical to SEQ ID NO: 10193

SEQ ID NO: 46163 - DNA, 18 bp, Homo Sapiens
ccataacccagaggtcga

SEQ ID NO: 46164 - DNA, 23 bp, Homo Sapiens
ccataacccagaggtcgatggat

SEQ ID NO: 46165 - DNA, 42 bp, Homo Sapiens; identical to SEQ ID NO: 10222

SEQ ID NO: 46166 - DNA, 28 bp, Homo Sapiens
ccatatggtctagcggttaggattcctg

SEQ ID NO: 46167 - DNA, 31 bp, Homo Sapiens; identical to SEQ ID NO: 10248

SEQ ID NO: 46168 - DNA, 34 bp, Homo Sapiens; identical to SEQ ID NO: 10251

SEQ ID NO: 46169 - DNA, 16 bp, Homo Sapiens
ccatcctctgctacca

SEQ ID NO: 46170 - DNA, 29 bp, Homo Sapiens
ccatgatcgtatagtggttagtactctgc

SEQ ID NO: 46171 - DNA, 25 bp, Homo Sapiens
ccatggtgtaatggttagcactctg

SEQ ID NO: 46172 - DNA, 30 bp, Homo Sapiens; identical to SEQ ID NO: 10275

SEQ ID NO: 46173 - DNA, 32 bp, Homo Sapiens; identical to SEQ ID NO: 10277

SEQ ID NO: 46174 - DNA, 16 bp, Homo Sapiens
ccattcttgcgacccg

SEQ ID NO: 46175 - DNA, 17 bp, Homo Sapiens
ccattcttgcgacccgg

SEQ ID NO: 46176 - DNA, 19 bp, Homo Sapiens
ccattcttgcgacccgggt

SEQ ID NO: 46177 - DNA, 40 bp, Homo Sapiens
ccattgtgctttgcacgcgtgggttcgaatcccatcctcg

SEQ ID NO: 46178 - DNA, 45 bp, Homo Sapiens; identical to SEQ ID NO: 10317

SEQ ID NO: 46179 - DNA, 46 bp, Homo Sapiens; identical to SEQ ID NO: 10318

SEQ ID NO: 46180 - DNA, 33 bp, Homo Sapiens; identical to SEQ ID NO: 10334

SEQ ID NO: 46181 - DNA, 36 bp, Homo Sapiens; identical to SEQ ID NO: 10337

SEQ ID NO: 46182 - DNA, 37 bp, Homo Sapiens; identical to SEQ ID NO: 10338

SEQ ID NO: 46183 - DNA, 21 bp, Homo Sapiens
cccaacttacacttaggagat

SEQ ID NO: 46184 - DNA, 28 bp, Homo Sapiens
cccaacttacacttaggagatttcaact

SEQ ID NO: 46185 - DNA, 29 bp, Homo Sapiens
cccaacttacacttaggagatttcaactt

SEQ ID NO: 46186 - DNA, 33 bp, Homo Sapiens
cccaacttacacttaggagatttcaacttaact

SEQ ID NO: 46187 - DNA, 39 bp, Homo Sapiens; identical to SEQ ID NO: 10358

SEQ ID NO: 46188 - DNA, 41 bp, Homo Sapiens; identical to SEQ ID NO: 10360

SEQ ID NO: 46189 - DNA, 42 bp, Homo Sapiens; identical to SEQ ID NO: 10361

SEQ ID NO: 46190 - DNA, 43 bp, Homo Sapiens; identical to SEQ ID NO: 10362

SEQ ID NO: 46191 - DNA, 44 bp, Homo Sapiens; identical to SEQ ID NO: 10363

SEQ ID NO: 46192 - DNA, 45 bp, Homo Sapiens; identical to SEQ ID NO: 10364

SEQ ID NO: 46193 - DNA, 46 bp, Homo Sapiens; identical to SEQ ID NO: 10365

SEQ ID NO: 46194 - DNA, 47 bp, Homo Sapiens; identical to SEQ ID NO: 10366

SEQ ID NO: 46195 - DNA, 16 bp, Homo Sapiens
cccacatggtctagcg

SEQ ID NO: 46196 - DNA, 25 bp, Homo Sapiens
cccacatggtctagcggttaggatt

SEQ ID NO: 46197 - DNA, 27 bp, Homo Sapiens
cccacatggtctagcggttaggattcc

SEQ ID NO: 46198 - DNA, 28 bp, Homo Sapiens
cccacatggtctagcggttaggattcct

SEQ ID NO: 46199 - DNA, 29 bp, Homo Sapiens
cccacatggtctagcggttaggattcctg

SEQ ID NO: 46200 - DNA, 30 bp, Homo Sapiens; identical to SEQ ID NO: 10375

SEQ ID NO: 46201 - DNA, 31 bp, Homo Sapiens; identical to SEQ ID NO: 10376

SEQ ID NO: 46202 - DNA, 32 bp, Homo Sapiens; identical to SEQ ID NO: 10377

SEQ ID NO: 46203 - DNA, 33 bp, Homo Sapiens; identical to SEQ ID NO: 10378

SEQ ID NO: 46204 - DNA, 34 bp, Homo Sapiens; identical to SEQ ID NO: 10379

SEQ ID NO: 46205 - DNA, 16 bp, Homo Sapiens
cccaccagagtcgcca

SEQ ID NO: 46206 - DNA, 16 bp, Homo Sapiens
cccacccagggacgcc

SEQ ID NO: 46207 - DNA, 17 bp, Homo Sapiens
cccacccagggacgcca

SEQ ID NO: 46208 - DNA, 16 bp, Homo Sapiens
cccacccggggtacca

SEQ ID NO: 46209 - DNA, 16 bp, Homo Sapiens
cccaccgctgccacca

SEQ ID NO: 46210 - DNA, 16 bp, Homo Sapiens
cccacctggggtacca

SEQ ID NO: 46211 - DNA, 16 bp, Homo Sapiens
cccacctggggtgcca

SEQ ID NO: 46212 - DNA, 16 bp, Homo Sapiens
cccacgttgggcgcca

SEQ ID NO: 46213 - DNA, 16 bp, Homo Sapiens
cccactcctgacacca

SEQ ID NO: 46214 - DNA, 16 bp, Homo Sapiens
cccactcctggtacca

SEQ ID NO: 46215 - DNA, 16 bp, Homo Sapiens
cccacttctgacacca

SEQ ID NO: 46216 - DNA, 17 bp, Homo Sapiens
cccagaggtcgatggat

SEQ ID NO: 46217 - DNA, 18 bp, Homo Sapiens
cccagaggtcgatggatc

SEQ ID NO: 46218 - DNA, 19 bp, Homo Sapiens
cccagaggtcgatggatcg

SEQ ID NO: 46219 - DNA, 37 bp, Homo Sapiens; identical to SEQ ID NO: 34772

SEQ ID NO: 46220 - DNA, 16 bp, Homo Sapiens
cccagcatctccacca

SEQ ID NO: 46221 - DNA, 16 bp, Homo Sapiens
cccagcggggcctcca

SEQ ID NO: 46222 - DNA, 16 bp, Homo Sapiens
cccagcggtgcctcca

SEQ ID NO: 46223 - DNA, 30 bp, Homo Sapiens; identical to SEQ ID NO: 10415

SEQ ID NO: 46224 - DNA, 31 bp, Homo Sapiens; identical to SEQ ID NO: 10416

SEQ ID NO: 46225 - DNA, 32 bp, Homo Sapiens; identical to SEQ ID NO: 10417

SEQ ID NO: 46226 - DNA, 33 bp, Homo Sapiens; identical to SEQ ID NO: 10418

SEQ ID NO: 46227 - DNA, 35 bp, Homo Sapiens; identical to SEQ ID NO: 10420

SEQ ID NO: 46228 - DNA, 36 bp, Homo Sapiens; identical to SEQ ID NO: 10421

SEQ ID NO: 46229 - DNA, 37 bp, Homo Sapiens; identical to SEQ ID NO: 10422

SEQ ID NO: 46230 - DNA, 38 bp, Homo Sapiens; identical to SEQ ID NO: 10423

SEQ ID NO: 46231 - DNA, 16 bp, Homo Sapiens
cccagtggaaccacca

SEQ ID NO: 46232 - DNA, 21 bp, Homo Sapiens
cccataacccagaggtcgatg

SEQ ID NO: 46233 - DNA, 24 bp, Homo Sapiens
cccataacccagaggtcgatggat

SEQ ID NO: 46234 - DNA, 32 bp, Homo Sapiens; identical to SEQ ID NO: 34794

SEQ ID NO: 46235 - DNA, 33 bp, Homo Sapiens; identical to SEQ ID NO: 34795

SEQ ID NO: 46236 - DNA, 32 bp, Homo Sapiens
cccataccccgaaaatgttggttatacccttc

SEQ ID NO: 46237 - DNA, 43 bp, Homo Sapiens; identical to SEQ ID NO: 10473

SEQ ID NO: 46238 - DNA, 25 bp, Homo Sapiens
cccatatggtctagcggttaggatt

SEQ ID NO: 46239 - DNA, 27 bp, Homo Sapiens
cccatatggtctagcggttaggattcc

SEQ ID NO: 46240 - DNA, 32 bp, Homo Sapiens; identical to SEQ ID NO: 10481

SEQ ID NO: 46241 - DNA, 34 bp, Homo Sapiens; identical to SEQ ID NO: 10483

SEQ ID NO: 46242 - DNA, 16 bp, Homo Sapiens
cccatcctcgtcgcca

SEQ ID NO: 46243 - DNA, 16 bp, Homo Sapiens
cccatctggggtgcca

SEQ ID NO: 46244 - DNA, 16 bp, Homo Sapiens
cccatctgggtcgcca

SEQ ID NO: 46245 - DNA, 30 bp, Homo Sapiens; identical to SEQ ID NO: 10495

SEQ ID NO: 46246 - DNA, 16 bp, Homo Sapiens
cccattcttgcgaccc

SEQ ID NO: 46247 - DNA, 17 bp, Homo Sapiens
cccattcttgcgacccg

SEQ ID NO: 46248 - DNA, 18 bp, Homo Sapiens
cccattcttgcgacccgg

SEQ ID NO: 46249 - DNA, 19 bp, Homo Sapiens
cccattcttgcgacccggg

SEQ ID NO: 46250 - DNA, 20 bp, Homo Sapiens
cccattcttgcgacccgggt

SEQ ID NO: 46251 - DNA, 21 bp, Homo Sapiens
cccattcttgcgacccgggtt

SEQ ID NO: 46252 - DNA, 22 bp, Homo Sapiens
cccattcttgcgacccgggttc

SEQ ID NO: 46253 - DNA, 23 bp, Homo Sapiens
cccattcttgcgacccgggttcg

SEQ ID NO: 46254 - DNA, 24 bp, Homo Sapiens
cccattcttgcgacccgggttcga

SEQ ID NO: 46255 - DNA, 25 bp, Homo Sapiens
cccattcttgcgacccgggttcgat

SEQ ID NO: 46256 - DNA, 26 bp, Homo Sapiens
cccattcttgcgacccgggttcgatt

SEQ ID NO: 46257 - DNA, 35 bp, Homo Sapiens; identical to SEQ ID NO: 10520

SEQ ID NO: 46258 - DNA, 36 bp, Homo Sapiens; identical to SEQ ID NO: 10521

SEQ ID NO: 46259 - DNA, 37 bp, Homo Sapiens; identical to SEQ ID NO: 10522

SEQ ID NO: 46260 - DNA, 38 bp, Homo Sapiens; identical to SEQ ID NO: 10523

SEQ ID NO: 46261 - DNA, 39 bp, Homo Sapiens; identical to SEQ ID NO: 10524

SEQ ID NO: 46262 - DNA, 40 bp, Homo Sapiens; identical to SEQ ID NO: 10525

SEQ ID NO: 46263 - DNA, 41 bp, Homo Sapiens; identical to SEQ ID NO: 10526

SEQ ID NO: 46264 - DNA, 42 bp, Homo Sapiens; identical to SEQ ID NO: 10527

SEQ ID NO: 46265 - DNA, 16 bp, Homo Sapiens
cccattggtctagcca

SEQ ID NO: 46266 - DNA, 16 bp, Homo Sapiens
ccccacattgggcgcc

SEQ ID NO: 46267 - DNA, 16 bp, Homo Sapiens
ccccacgttgggcgcc

SEQ ID NO: 46268 - DNA, 17 bp, Homo Sapiens
ccccacgttgggcgcca

SEQ ID NO: 46269 - DNA, 16 bp, Homo Sapiens
ccccactcctggtacc

SEQ ID NO: 46270 - DNA, 16 bp, Homo Sapiens
ccccagcatctccacc

SEQ ID NO: 46271 - DNA, 16 bp, Homo Sapiens
ccccagtggaaccacc

SEQ ID NO: 46272 - DNA, 17 bp, Homo Sapiens
ccccagtggaaccacca

SEQ ID NO: 46273 - DNA, 31 bp, Homo Sapiens; identical to SEQ ID NO: 10560

SEQ ID NO: 46274 - DNA, 22 bp, Homo Sapiens
ccccatgtctaacaacatggct

SEQ ID NO: 46275 - DNA, 30 bp, Homo Sapiens; identical to SEQ ID NO: 10569

SEQ ID NO: 46276 - DNA, 31 bp, Homo Sapiens; identical to SEQ ID NO: 10570

SEQ ID NO: 46277 - DNA, 17 bp, Homo Sapiens
cccccggctcctccacc

SEQ ID NO: 46278 - DNA, 18 bp, Homo Sapiens
cccccggctcctccacca

SEQ ID NO: 46279 - DNA, 37 bp, Homo Sapiens; identical to SEQ ID NO: 10600

SEQ ID NO: 46280 - DNA, 16 bp, Homo Sapiens
ccccgacggggagcca

SEQ ID NO: 46281 - DNA, 32 bp, Homo Sapiens; identical to SEQ ID NO: 34862

SEQ ID NO: 46282 - DNA, 33 bp, Homo Sapiens; identical to SEQ ID NO: 34863

SEQ ID NO: 46283 - DNA, 31 bp, Homo Sapiens; identical to SEQ ID NO: 34871

SEQ ID NO: 46284 - DNA, 32 bp, Homo Sapiens; identical to SEQ ID NO: 34872

SEQ ID NO: 46285 - DNA, 33 bp, Homo Sapiens; identical to SEQ ID NO: 10606

SEQ ID NO: 46286 - DNA, 34 bp, Homo Sapiens; identical to SEQ ID NO: 34874

SEQ ID NO: 46287 - DNA, 21 bp, Homo Sapiens
ccccgcgcaggttcgaatcct

SEQ ID NO: 46288 - DNA, 31 bp, Homo Sapiens; identical to SEQ ID NO: 34884

SEQ ID NO: 46289 - DNA, 32 bp, Homo Sapiens; identical to SEQ ID NO: 34885

SEQ ID NO: 46290 - DNA, 33 bp, Homo Sapiens; identical to SEQ ID NO: 10615

SEQ ID NO: 46291 - DNA, 31 bp, Homo Sapiens; identical to SEQ ID NO: 34890

SEQ ID NO: 46292 - DNA, 32 bp, Homo Sapiens; identical to SEQ ID NO: 34891

SEQ ID NO: 46293 - DNA, 33 bp, Homo Sapiens; identical to SEQ ID NO: 10618

SEQ ID NO: 46294 - DNA, 16 bp, Homo Sapiens
ccccggcacctccacc

SEQ ID NO: 46295 - DNA, 17 bp, Homo Sapiens
ccccggcacctccacca

SEQ ID NO: 46296 - DNA, 16 bp, Homo Sapiens
ccccggcatctccacc

SEQ ID NO: 46297 - DNA, 17 bp, Homo Sapiens
ccccggcatctccacca

SEQ ID NO: 46298 - DNA, 29 bp, Homo Sapiens
ccccgggttcaatccccggcacctccacc

SEQ ID NO: 46299 - DNA, 30 bp, Homo Sapiens; identical to SEQ ID NO: 10630

SEQ ID NO: 46300 - DNA, 29 bp, Homo Sapiens
ccccgggttcgatccccggcatctccacc

SEQ ID NO: 46301 - DNA, 30 bp, Homo Sapiens; identical to SEQ ID NO: 10637

SEQ ID NO: 46302 - DNA, 16 bp, Homo Sapiens
ccccgtacgggccacc

SEQ ID NO: 46303 - DNA, 17 bp, Homo Sapiens
ccccgtacgggccacca

SEQ ID NO: 46304 - DNA, 16 bp, Homo Sapiens
ccccgtactggccacc

SEQ ID NO: 46305 - DNA, 16 bp, Homo Sapiens
ccccgtccgtgcctcc

SEQ ID NO: 46306 - DNA, 17 bp, Homo Sapiens
ccccgtccgtgcctcca

SEQ ID NO: 46307 - DNA, 17 bp, Homo Sapiens
cccctggaggcgtgggt

SEQ ID NO: 46308 - DNA, 16 bp, Homo Sapiens
ccccttatttacccca

SEQ ID NO: 46309 - DNA, 33 bp, Homo Sapiens; identical to SEQ ID NO: 10671

SEQ ID NO: 46310 - DNA, 36 bp, Homo Sapiens; identical to SEQ ID NO: 10674

SEQ ID NO: 46311 - DNA, 16 bp, Homo Sapiens
cccgcatcctccacca

SEQ ID NO: 46312 - DNA, 47 bp, Homo Sapiens; identical to SEQ ID NO: 34929

SEQ ID NO: 46313 - DNA, 31 bp, Homo Sapiens; identical to SEQ ID NO: 34935

SEQ ID NO: 46314 - DNA, 16 bp, Homo Sapiens
cccggacgagccccca

SEQ ID NO: 46315 - DNA, 18 bp, Homo Sapiens
cccggatagctcagtcgg

SEQ ID NO: 46316 - DNA, 31 bp, Homo Sapiens; identical to SEQ ID NO: 10702

SEQ ID NO: 46317 - DNA, 32 bp, Homo Sapiens; identical to SEQ ID NO: 10703

SEQ ID NO: 46318 - DNA, 16 bp, Homo Sapiens
cccggcacctccacca

SEQ ID NO: 46319 - DNA, 16 bp, Homo Sapiens
cccggcatctccacca

SEQ ID NO: 46320 - DNA, 16 bp, Homo Sapiens
cccggccaacgcacca

SEQ ID NO: 46321 - DNA, 16 bp, Homo Sapiens
cccggccaatgcacca

SEQ ID NO: 46322 - DNA, 16 bp, Homo Sapiens
cccggccagtgcacca

SEQ ID NO: 46323 - DNA, 16 bp, Homo Sapiens
cccggcccatgcacca

SEQ ID NO: 46324 - DNA, 16 bp, Homo Sapiens
cccggcggagtcgcca

SEQ ID NO: 46325 - DNA, 18 bp, Homo Sapiens
cccggctagctcagtcgg

SEQ ID NO: 46326 - DNA, 27 bp, Homo Sapiens
cccggctagctcagtcggtagagcatg

SEQ ID NO: 46327 - DNA, 32 bp, Homo Sapiens; identical to SEQ ID NO: 10728

SEQ ID NO: 46328 - DNA, 33 bp, Homo Sapiens; identical to SEQ ID NO: 10729

SEQ ID NO: 46329 - DNA, 28 bp, Homo Sapiens
cccggctagctcagtcggtagagcatgg

SEQ ID NO: 46330 - DNA, 31 bp, Homo Sapiens; identical to SEQ ID NO: 10743

SEQ ID NO: 46331 - DNA, 32 bp, Homo Sapiens; identical to SEQ ID NO: 10744

SEQ ID NO: 46332 - DNA, 33 bp, Homo Sapiens; identical to SEQ ID NO: 10745

SEQ ID NO: 46333 - DNA, 41 bp, Homo Sapiens; identical to SEQ ID NO: 10750

SEQ ID NO: 46334 - DNA, 16 bp, Homo Sapiens
cccggctcctccacca

SEQ ID NO: 46335 - DNA, 16 bp, Homo Sapiens
cccgggcggaaacacc

SEQ ID NO: 46336 - DNA, 17 bp, Homo Sapiens
cccgggcggaaacacca

SEQ ID NO: 46337 - DNA, 16 bp, Homo Sapiens
cccgggcggcgcacca

SEQ ID NO: 46338 - DNA, 28 bp, Homo Sapiens
cccgggttcaatccccggcacctccacc

SEQ ID NO: 46339 - DNA, 27 bp, Homo Sapiens
cccgggttcgactcccggtatgggaac

SEQ ID NO: 46340 - DNA, 25 bp, Homo Sapiens
cccgggttcgactcccggtgtggga

SEQ ID NO: 46341 - DNA, 26 bp, Homo Sapiens
cccgggttcgactcccggtgtgggaa

SEQ ID NO: 46342 - DNA, 27 bp, Homo Sapiens
cccgggttcgactcccggtgtgggaac

SEQ ID NO: 46343 - DNA, 28 bp, Homo Sapiens
cccgggttcgactcccggtgtgggaacc

SEQ ID NO: 46344 - DNA, 28 bp, Homo Sapiens
cccgggttcgatccccagcatctccacc

SEQ ID NO: 46345 - DNA, 28 bp, Homo Sapiens
cccgggttcgatccccggcatctccacc

SEQ ID NO: 46346 - DNA, 29 bp, Homo Sapiens
cccgggttcgatccccggcatctccacca

SEQ ID NO: 46347 - DNA, 27 bp, Homo Sapiens
cccgggttcgattcccggtcagggaac

SEQ ID NO: 46348 - DNA, 16 bp, Homo Sapiens
cccgggtttcggcacc

SEQ ID NO: 46349 - DNA, 17 bp, Homo Sapiens
cccgggtttcggcacca

SEQ ID NO: 46350 - DNA, 16 bp, Homo Sapiens
cccggtatgggaacca

SEQ ID NO: 46351 - DNA, 16 bp, Homo Sapiens
cccggtcagggaacca

SEQ ID NO: 46352 - DNA, 16 bp, Homo Sapiens
cccggtgtgggaacca

SEQ ID NO: 46353 - DNA, 16 bp, Homo Sapiens
cccgtacgggccacca

SEQ ID NO: 46354 - DNA, 16 bp, Homo Sapiens
cccgtccgtgcctcca

SEQ ID NO: 46355 - DNA, 16 bp, Homo Sapiens
ccctacgttgggcgcc

SEQ ID NO: 46356 - DNA, 30 bp, Homo Sapiens; identical to SEQ ID NO: 10827

SEQ ID NO: 46357 - DNA, 33 bp, Homo Sapiens; identical to SEQ ID NO: 10830

SEQ ID NO: 46358 - DNA, 16 bp, Homo Sapiens
ccctccgtggttacca

SEQ ID NO: 46359 - DNA, 16 bp, Homo Sapiens
ccctgctcgctgcgcc

SEQ ID NO: 46360 - DNA, 17 bp, Homo Sapiens
ccctgctcgctgcgcca

SEQ ID NO: 46361 - DNA, 32 bp, Homo Sapiens; identical to SEQ ID NO: 10846

SEQ ID NO: 46362 - DNA, 24 bp, Homo Sapiens
ccctggtggtctagtggttaggat

SEQ ID NO: 46363 - DNA, 26 bp, Homo Sapiens
ccctggtggtctagtggttaggattc

SEQ ID NO: 46364 - DNA, 27 bp, Homo Sapiens
ccctggtggtctagtggttaggattcg

SEQ ID NO: 46365 - DNA, 28 bp, Homo Sapiens
ccctggtggtctagtggttaggattcgg

SEQ ID NO: 46366 - DNA, 29 bp, Homo Sapiens
ccctggtggtctagtggttaggattcggc

SEQ ID NO: 46367 - DNA, 30 bp, Homo Sapiens; identical to SEQ ID NO: 10862

SEQ ID NO: 46368 - DNA, 31 bp, Homo Sapiens; identical to SEQ ID NO: 10863

SEQ ID NO: 46369 - DNA, 32 bp, Homo Sapiens; identical to SEQ ID NO: 10864

SEQ ID NO: 46370 - DNA, 33 bp, Homo Sapiens; identical to SEQ ID NO: 10865

SEQ ID NO: 46371 - DNA, 34 bp, Homo Sapiens; identical to SEQ ID NO: 10866

SEQ ID NO: 46372 - DNA, 41 bp, Homo Sapiens; identical to SEQ ID NO: 10872

SEQ ID NO: 46373 - DNA, 27 bp, Homo Sapiens
ccctggttcgatcccgggtttcggcac

SEQ ID NO: 46374 - DNA, 29 bp, Homo Sapiens
ccctggttcgatcccgggtttcggcacca

SEQ ID NO: 46375 - DNA, 16 bp, Homo Sapiens
ccctgttcgggcgcca

SEQ ID NO: 46376 - DNA, 16 bp, Homo Sapiens
cccttcgtggtcgcca

SEQ ID NO: 46377 - DNA, 19 bp, Homo Sapiens
ccgaaaatgttggttatac

SEQ ID NO: 46378 - DNA, 31 bp, Homo Sapiens; identical to SEQ ID NO: 10905

SEQ ID NO: 46379 - DNA, 32 bp, Homo Sapiens; identical to SEQ ID NO: 10906

SEQ ID NO: 46380 - DNA, 34 bp, Homo Sapiens; identical to SEQ ID NO: 10908

SEQ ID NO: 46381 - DNA, 35 bp, Homo Sapiens; identical to SEQ ID NO: 10909

SEQ ID NO: 46382 - DNA, 17 bp, Homo Sapiens
ccgaaaggttggtggtt

SEQ ID NO: 46383 - DNA, 35 bp, Homo Sapiens; identical to SEQ ID NO: 10915

SEQ ID NO: 46384 - DNA, 36 bp, Homo Sapiens; identical to SEQ ID NO: 10916

SEQ ID NO: 46385 - DNA, 37 bp, Homo Sapiens; identical to SEQ ID NO: 10917

SEQ ID NO: 46386 - DNA, 38 bp, Homo Sapiens; identical to SEQ ID NO: 10918

SEQ ID NO: 46387 - DNA, 37 bp, Homo Sapiens; identical to SEQ ID NO: 10919

SEQ ID NO: 46388 - DNA, 20 bp, Homo Sapiens
ccgaaatagctcagttggga

SEQ ID NO: 46389 - DNA, 22 bp, Homo Sapiens
ccgaaatagctcagttgggaga

SEQ ID NO: 46390 - DNA, 16 bp, Homo Sapiens
ccgaagatcacgggtt

SEQ ID NO: 46391 - DNA, 34 bp, Homo Sapiens; identical to SEQ ID NO: 10924

SEQ ID NO: 46392 - DNA, 36 bp, Homo Sapiens; identical to SEQ ID NO: 10926

SEQ ID NO: 46393 - DNA, 16 bp, Homo Sapiens
ccgaagatcgcgggtt

SEQ ID NO: 46394 - DNA, 22 bp, Homo Sapiens
ccgaagatcgcgggttcgaacc

SEQ ID NO: 46395 - DNA, 23 bp, Homo Sapiens
ccgaagatcgcgggttcgaaccc

SEQ ID NO: 46396 - DNA, 34 bp, Homo Sapiens; identical to SEQ ID NO: 10933

SEQ ID NO: 46397 - DNA, 33 bp, Homo Sapiens; identical to SEQ ID NO: 10937

SEQ ID NO: 46398 - DNA, 34 bp, Homo Sapiens; identical to SEQ ID NO: 35054

SEQ ID NO: 46399 - DNA, 35 bp, Homo Sapiens; identical to SEQ ID NO: 10938

SEQ ID NO: 46400 - DNA, 36 bp, Homo Sapiens; identical to SEQ ID NO: 10939

SEQ ID NO: 46401 - DNA, 37 bp, Homo Sapiens; identical to SEQ ID NO: 10940

SEQ ID NO: 46402 - DNA, 38 bp, Homo Sapiens; identical to SEQ ID NO: 10941

SEQ ID NO: 46403 - DNA, 34 bp, Homo Sapiens; identical to SEQ ID NO: 35059

SEQ ID NO: 46404 - DNA, 35 bp, Homo Sapiens
ccgagatagctcagttgggagagcgttagactgaa

SEQ ID NO: 46405 - DNA, 16 bp, Homo Sapiens
ccgagcggtctaaggc

SEQ ID NO: 46406 - DNA, 16 bp, Homo Sapiens
ccgaggttgtgagttc

SEQ ID NO: 46407 - DNA, 16 bp, Homo Sapiens
ccgagtcacggcacca

SEQ ID NO: 46408 - DNA, 16 bp, Homo Sapiens
ccgagtggtctaaggc

SEQ ID NO: 46409 - DNA, 26 bp, Homo Sapiens
ccgagttcaaatctcggtggaacctc

SEQ ID NO: 46410 - DNA, 25 bp, Homo Sapiens
ccgagttcaaatctcggtgggacct

SEQ ID NO: 46411 - DNA, 26 bp, Homo Sapiens
ccgagttcaaatctcggtgggacctc

SEQ ID NO: 46412 - DNA, 16 bp, Homo Sapiens
ccgcacgttgggcgcc

SEQ ID NO: 46413 - DNA, 36 bp, Homo Sapiens; identical to SEQ ID NO: 10989

SEQ ID NO: 46414 - DNA, 37 bp, Homo Sapiens; identical to SEQ ID NO: 10990

SEQ ID NO: 46415 - DNA, 38 bp, Homo Sapiens; identical to SEQ ID NO: 10991

SEQ ID NO: 46416 - DNA, 16 bp, Homo Sapiens
ccgccgcggcccgggt

SEQ ID NO: 46417 - DNA, 17 bp, Homo Sapiens
ccgccgcggcccgggtt

SEQ ID NO: 46418 - DNA, 18 bp, Homo Sapiens
ccgccgcggcccgggttc

SEQ ID NO: 46419 - DNA, 28 bp, Homo Sapiens
ccgccgcggcccgggttcgattcccggt

SEQ ID NO: 46420 - DNA, 29 bp, Homo Sapiens
ccgccgcggcccgggttcgattcccggtc

SEQ ID NO: 46421 - DNA, 30 bp, Homo Sapiens; identical to SEQ ID NO: 11008

SEQ ID NO: 46422 - DNA, 31 bp, Homo Sapiens; identical to SEQ ID NO: 11009

SEQ ID NO: 46423 - DNA, 32 bp, Homo Sapiens; identical to SEQ ID NO: 11010

SEQ ID NO: 46424 - DNA, 33 bp, Homo Sapiens; identical to SEQ ID NO: 11011

SEQ ID NO: 46425 - DNA, 35 bp, Homo Sapiens; identical to SEQ ID NO: 11013

SEQ ID NO: 46426 - DNA, 36 bp, Homo Sapiens; identical to SEQ ID NO: 11014

SEQ ID NO: 46427 - DNA, 37 bp, Homo Sapiens; identical to SEQ ID NO: 11015

SEQ ID NO: 46428 - DNA, 38 bp, Homo Sapiens; identical to SEQ ID NO: 11016

SEQ ID NO: 46429 - DNA, 25 bp, Homo Sapiens
ccgcctgtcacgcgggagaccgggg

SEQ ID NO: 46430 - DNA, 26 bp, Homo Sapiens
ccgcctgtcacgcgggagaccggggt

SEQ ID NO: 46431 - DNA, 46 bp, Homo Sapiens; identical to SEQ ID NO: 11018

SEQ ID NO: 46432 - DNA, 46 bp, Homo Sapiens; identical to SEQ ID NO: 11024

SEQ ID NO: 46433 - DNA, 47 bp, Homo Sapiens; identical to SEQ ID NO: 11025

SEQ ID NO: 46434 - DNA, 16 bp, Homo Sapiens
ccgcggcccgggttcg

SEQ ID NO: 46435 - DNA, 18 bp, Homo Sapiens
ccgcggcccgggttcgat

SEQ ID NO: 46436 - DNA, 19 bp, Homo Sapiens
ccgcggcccgggttcgatt

SEQ ID NO: 46437 - DNA, 20 bp, Homo Sapiens
ccgcggcccgggttcgattc

SEQ ID NO: 46438 - DNA, 21 bp, Homo Sapiens
ccgcggcccgggttcgattcc

SEQ ID NO: 46439 - DNA, 22 bp, Homo Sapiens
ccgcggcccgggttcgattccc

SEQ ID NO: 46440 - DNA, 25 bp, Homo Sapiens
ccgcggcccgggttcgattcccggt

SEQ ID NO: 46441 - DNA, 26 bp, Homo Sapiens
ccgcggcccgggttcgattcccggtc

SEQ ID NO: 46442 - DNA, 27 bp, Homo Sapiens
ccgcggcccgggttcgattcccggtca

SEQ ID NO: 46443 - DNA, 28 bp, Homo Sapiens
ccgcggcccgggttcgattcccggtcag

SEQ ID NO: 46444 - DNA, 29 bp, Homo Sapiens
ccgcggcccgggttcgattcccggtcagg

SEQ ID NO: 46445 - DNA, 30 bp, Homo Sapiens; identical to SEQ ID NO: 11045

SEQ ID NO: 46446 - DNA, 32 bp, Homo Sapiens; identical to SEQ ID NO: 11046

SEQ ID NO: 46447 - DNA, 33 bp, Homo Sapiens; identical to SEQ ID NO: 11047

SEQ ID NO: 46448 - DNA, 34 bp, Homo Sapiens; identical to SEQ ID NO: 11048

SEQ ID NO: 46449 - DNA, 35 bp, Homo Sapiens; identical to SEQ ID NO: 11049

SEQ ID NO: 46450 - DNA, 28 bp, Homo Sapiens
ccgcgtggcctaatggataaggcgtctg

SEQ ID NO: 46451 - DNA, 29 bp, Homo Sapiens
ccgcgtggcctaatggataaggcgtctga

SEQ ID NO: 46452 - DNA, 23 bp, Homo Sapiens
ccgctggtgtagtggtatcatgc

SEQ ID NO: 46453 - DNA, 24 bp, Homo Sapiens
ccgctggtgtagtggtatcatgca

SEQ ID NO: 46454 - DNA, 25 bp, Homo Sapiens
ccgctggtgtagtggtatcatgcaa

SEQ ID NO: 46455 - DNA, 26 bp, Homo Sapiens
ccgctggtgtagtggtatcatgcaag

SEQ ID NO: 46456 - DNA, 27 bp, Homo Sapiens
ccgctggtgtagtggtatcatgcaaga

SEQ ID NO: 46457 - DNA, 29 bp, Homo Sapiens
ccgctggtgtagtggtatcatgcaagatt

SEQ ID NO: 46458 - DNA, 32 bp, Homo Sapiens; identical to SEQ ID NO: 11072

SEQ ID NO: 46459 - DNA, 36 bp, Homo Sapiens; identical to SEQ ID NO: 11075

SEQ ID NO: 46460 - DNA, 46 bp, Homo Sapiens; identical to SEQ ID NO: 11079

SEQ ID NO: 46461 - DNA, 47 bp, Homo Sapiens; identical to SEQ ID NO: 11080

SEQ ID NO: 46462 - DNA, 16 bp, Homo Sapiens
ccggagatgaaaacct

SEQ ID NO: 46463 - DNA, 28 bp, Homo Sapiens
ccggagatgaaaacctttttccaaggac

SEQ ID NO: 46464 - DNA, 29 bp, Homo Sapiens
ccggagatgaaaacctttttccaaggaca

SEQ ID NO: 46465 - DNA, 30 bp, Homo Sapiens; identical to SEQ ID NO: 11096

SEQ ID NO: 46466 - DNA, 31 bp, Homo Sapiens; identical to SEQ ID NO: 11097

SEQ ID NO: 46467 - DNA, 32 bp, Homo Sapiens; identical to SEQ ID NO: 11098

SEQ ID NO: 46468 - DNA, 17 bp, Homo Sapiens
ccggagctggggattgt

SEQ ID NO: 46469 - DNA, 24 bp, Homo Sapiens
ccggagctggggattgtgggttcg

SEQ ID NO: 46470 - DNA, 27 bp, Homo Sapiens
ccggagctggggattgtgggttcgagt

SEQ ID NO: 46471 - DNA, 28 bp, Homo Sapiens
ccggagctggggattgtgggttcgagtc

SEQ ID NO: 46472 - DNA, 33 bp, Homo Sapiens; identical to SEQ ID NO: 11101

SEQ ID NO: 46473 - DNA, 21 bp, Homo Sapiens
ccggatagctcagtcggtaga

SEQ ID NO: 46474 - DNA, 22 bp, Homo Sapiens
ccggatagctcagtcggtagag

SEQ ID NO: 46475 - DNA, 23 bp, Homo Sapiens
ccggatagctcagtcggtagagc

SEQ ID NO: 46476 - DNA, 25 bp, Homo Sapiens
ccggatagctcagtcggtagagcat

SEQ ID NO: 46477 - DNA, 26 bp, Homo Sapiens
ccggatagctcagtcggtagagcatc

SEQ ID NO: 46478 - DNA, 27 bp, Homo Sapiens
ccggatagctcagtcggtagagcatca

SEQ ID NO: 46479 - DNA, 28 bp, Homo Sapiens
ccggatagctcagtcggtagagcatcag

SEQ ID NO: 46480 - DNA, 29 bp, Homo Sapiens
ccggatagctcagtcggtagagcatcaga

SEQ ID NO: 46481 - DNA, 30 bp, Homo Sapiens; identical to SEQ ID NO: 11116

SEQ ID NO: 46482 - DNA, 31 bp, Homo Sapiens; identical to SEQ ID NO: 11117

SEQ ID NO: 46483 - DNA, 17 bp, Homo Sapiens
ccggatcagaagattga

SEQ ID NO: 46484 - DNA, 21 bp, Homo Sapiens
ccggatcagaagattgagggt

SEQ ID NO: 46485 - DNA, 31 bp, Homo Sapiens; identical to SEQ ID NO: 11132

SEQ ID NO: 46486 - DNA, 18 bp, Homo Sapiens
ccggatggaggcgtgggt

SEQ ID NO: 46487 - DNA, 30 bp, Homo Sapiens; identical to SEQ ID NO: 11141

SEQ ID NO: 46488 - DNA, 36 bp, Homo Sapiens
ccggatggaggcgtgggttcgaatcccacttctgac

SEQ ID NO: 46489 - DNA, 37 bp, Homo Sapiens; identical to SEQ ID NO: 11143

SEQ ID NO: 46490 - DNA, 38 bp, Homo Sapiens; identical to SEQ ID NO: 11144

SEQ ID NO: 46491 - DNA, 39 bp, Homo Sapiens; identical to SEQ ID NO: 11145

SEQ ID NO: 46492 - DNA, 23 bp, Homo Sapiens
ccggctagctcagtcggtagagc

SEQ ID NO: 46493 - DNA, 24 bp, Homo Sapiens
ccggctagctcagtcggtagagca

SEQ ID NO: 46494 - DNA, 26 bp, Homo Sapiens
ccggctagctcagtcggtagagcatg

SEQ ID NO: 46495 - DNA, 27 bp, Homo Sapiens
ccggctagctcagtcggtagagcatga

SEQ ID NO: 46496 - DNA, 28 bp, Homo Sapiens
ccggctagctcagtcggtagagcatgag

SEQ ID NO: 46497 - DNA, 30 bp, Homo Sapiens; identical to SEQ ID NO: 11159

SEQ ID NO: 46498 - DNA, 31 bp, Homo Sapiens; identical to SEQ ID NO: 11160

SEQ ID NO: 46499 - DNA, 32 bp, Homo Sapiens; identical to SEQ ID NO: 11161

SEQ ID NO: 46500 - DNA, 31 bp, Homo Sapiens; identical to SEQ ID NO: 11165

SEQ ID NO: 46501 - DNA, 32 bp, Homo Sapiens; identical to SEQ ID NO: 11166

SEQ ID NO: 46502 - DNA, 33 bp, Homo Sapiens; identical to SEQ ID NO: 11167

SEQ ID NO: 46503 - DNA, 38 bp, Homo Sapiens; identical to SEQ ID NO: 11172

SEQ ID NO: 46504 - DNA, 40 bp, Homo Sapiens; identical to SEQ ID NO: 11174

SEQ ID NO: 46505 - DNA, 41 bp, Homo Sapiens; identical to SEQ ID NO: 11175

SEQ ID NO: 46506 - DNA, 47 bp, Homo Sapiens; identical to SEQ ID NO: 35187

SEQ ID NO: 46507 - DNA, 27 bp, Homo Sapiens
ccggctagctcagtcggtagagcatgg

SEQ ID NO: 46508 - DNA, 28 bp, Homo Sapiens
ccggctagctcagtcggtagagcatggg

SEQ ID NO: 46509 - DNA, 29 bp, Homo Sapiens
ccggctagctcagtcggtagagcatggga

SEQ ID NO: 46510 - DNA, 30 bp, Homo Sapiens; identical to SEQ ID NO: 11179

SEQ ID NO: 46511 - DNA, 31 bp, Homo Sapiens; identical to SEQ ID NO: 11180

SEQ ID NO: 46512 - DNA, 32 bp, Homo Sapiens; identical to SEQ ID NO: 11181

SEQ ID NO: 46513 - DNA, 33 bp, Homo Sapiens; identical to SEQ ID NO: 11182

SEQ ID NO: 46514 - DNA, 34 bp, Homo Sapiens; identical to SEQ ID NO: 11183

SEQ ID NO: 46515 - DNA, 37 bp, Homo Sapiens; identical to SEQ ID NO: 11186

SEQ ID NO: 46516 - DNA, 39 bp, Homo Sapiens; identical to SEQ ID NO: 11188

SEQ ID NO: 46517 - DNA, 40 bp, Homo Sapiens; identical to SEQ ID NO: 11189

SEQ ID NO: 46518 - DNA, 47 bp, Homo Sapiens; identical to SEQ ID NO: 11191

SEQ ID NO: 46519 - DNA, 16 bp, Homo Sapiens
ccggctcgaaggacca

SEQ ID NO: 46520 - DNA, 16 bp, Homo Sapiens
ccggctcggaggacca

SEQ ID NO: 46521 - DNA, 16 bp, Homo Sapiens
ccgggcagaagcacca

SEQ ID NO: 46522 - DNA, 16 bp, Homo Sapiens
ccgggcggaaacacca

SEQ ID NO: 46523 - DNA, 27 bp, Homo Sapiens
ccggggttcaagtccctgttcgggcgc

SEQ ID NO: 46524 - DNA, 27 bp, Homo Sapiens
ccggggttcaattccccgacggggagc

SEQ ID NO: 46525 - DNA, 28 bp, Homo Sapiens
ccggggttcaattccccgacggggagcc

SEQ ID NO: 46526 - DNA, 16 bp, Homo Sapiens
ccggggttcgattccc

SEQ ID NO: 46527 - DNA, 23 bp, Homo Sapiens
ccggggttcgattccccgacggg

SEQ ID NO: 46528 - DNA, 24 bp, Homo Sapiens
ccggggttcgattccccgacgggg

SEQ ID NO: 46529 - DNA, 26 bp, Homo Sapiens
ccggggttcgattccccgacggggag

SEQ ID NO: 46530 - DNA, 27 bp, Homo Sapiens
ccggggttcgattccccgacggggagc

SEQ ID NO: 46531 - DNA, 28 bp, Homo Sapiens
ccggggttcgattccccgacggggagcc

SEQ ID NO: 46532 - DNA, 29 bp, Homo Sapiens
ccggggttcgattccccgacggggagcca

SEQ ID NO: 46533 - DNA, 16 bp, Homo Sapiens
ccgggtgccccctcca

SEQ ID NO: 46534 - DNA, 27 bp, Homo Sapiens
ccgggttcaatccccggcacctccacc

SEQ ID NO: 46535 - DNA, 24 bp, Homo Sapiens
ccgggttcgactcccggtgtggga

SEQ ID NO: 46536 - DNA, 25 bp, Homo Sapiens
ccgggttcgactcccggtgtgggaa

SEQ ID NO: 46537 - DNA, 26 bp, Homo Sapiens
ccgggttcgactcccggtgtgggaac

SEQ ID NO: 46538 - DNA, 27 bp, Homo Sapiens
ccgggttcgactcccggtgtgggaacc

SEQ ID NO: 46539 - DNA, 27 bp, Homo Sapiens
ccgggttcgagtcccggcggagtcgcc

SEQ ID NO: 46540 - DNA, 27 bp, Homo Sapiens
ccgggttcgatccccagcatctccacc

SEQ ID NO: 46541 - DNA, 27 bp, Homo Sapiens
ccgggttcgatccccggcatctccacc

SEQ ID NO: 46542 - DNA, 22 bp, Homo Sapiens
ccgggttcgattcccgggcggc

SEQ ID NO: 46543 - DNA, 23 bp, Homo Sapiens
ccgggttcgattcccgggcggcg

SEQ ID NO: 46544 - DNA, 23 bp, Homo Sapiens
ccgggttcgattcccggtcaggg

SEQ ID NO: 46545 - DNA, 26 bp, Homo Sapiens
ccgggttcgattcccggtcagggaac

SEQ ID NO: 46546 - DNA, 28 bp, Homo Sapiens
ccgggttcgattcccggtcagggaacca

SEQ ID NO: 46547 - DNA, 16 bp, Homo Sapiens
ccgggtttcggcacca

SEQ ID NO: 46548 - DNA, 24 bp, Homo Sapiens
ccggttcgaaaccgggcggaaaca

SEQ ID NO: 46549 - DNA, 19 bp, Homo Sapiens
ccgtagtgtagtggtcatc

SEQ ID NO: 46550 - DNA, 27 bp, Homo Sapiens
ccgtagtgtagtggtcatcacgttcgc

SEQ ID NO: 46551 - DNA, 28 bp, Homo Sapiens
ccgtagtgtagtggtcatcacgttcgcc

SEQ ID NO: 46552 - DNA, 29 bp, Homo Sapiens
ccgtagtgtagtggtcatcacgttcgcct

SEQ ID NO: 46553 - DNA, 19 bp, Homo Sapiens
ccgtagtgtagtggttatc

SEQ ID NO: 46554 - DNA, 20 bp, Homo Sapiens
ccgtagtgtagtggttatca

SEQ ID NO: 46555 - DNA, 27 bp, Homo Sapiens
ccgtagtgtagtggttatcacgttcgc

SEQ ID NO: 46556 - DNA, 28 bp, Homo Sapiens
ccgtagtgtagtggttatcacgttcgcc

SEQ ID NO: 46557 - DNA, 29 bp, Homo Sapiens
ccgtagtgtagtggttatcacgttcgcct

SEQ ID NO: 46558 - DNA, 32 bp, Homo Sapiens; identical to SEQ ID NO: 11297

SEQ ID NO: 46559 - DNA, 33 bp, Homo Sapiens; identical to SEQ ID NO: 11298

SEQ ID NO: 46560 - DNA, 39 bp, Homo Sapiens
ccgtagtgtagtggttatcacgttcgcctcacacgcgaa

SEQ ID NO: 46561 - DNA, 18 bp, Homo Sapiens
ccgtatggaggcgtgggt

SEQ ID NO: 46562 - DNA, 37 bp, Homo Sapiens; identical to SEQ ID NO: 35249

SEQ ID NO: 46563 - DNA, 38 bp, Homo Sapiens; identical to SEQ ID NO: 35250

SEQ ID NO: 46564 - DNA, 39 bp, Homo Sapiens; identical to SEQ ID NO: 35251

SEQ ID NO: 46565 - DNA, 22 bp, Homo Sapiens
ccgtgatcgtatagtggttagt

SEQ ID NO: 46566 - DNA, 23 bp, Homo Sapiens
ccgtgatcgtatagtggttagta

SEQ ID NO: 46567 - DNA, 24 bp, Homo Sapiens
ccgtgatcgtatagtggttagtac

SEQ ID NO: 46568 - DNA, 25 bp, Homo Sapiens
ccgtgatcgtatagtggttagtact

SEQ ID NO: 46569 - DNA, 26 bp, Homo Sapiens
ccgtgatcgtatagtggttagtactc

SEQ ID NO: 46570 - DNA, 27 bp, Homo Sapiens
ccgtgatcgtatagtggttagtactct

SEQ ID NO: 46571 - DNA, 28 bp, Homo Sapiens
ccgtgatcgtatagtggttagtactctg

SEQ ID NO: 46572 - DNA, 29 bp, Homo Sapiens
ccgtgatcgtatagtggttagtactctgc

SEQ ID NO: 46573 - DNA, 30 bp, Homo Sapiens; identical to SEQ ID NO: 11315

SEQ ID NO: 46574 - DNA, 31 bp, Homo Sapiens; identical to SEQ ID NO: 11316

SEQ ID NO: 46575 - DNA, 32 bp, Homo Sapiens; identical to SEQ ID NO: 11317

SEQ ID NO: 46576 - DNA, 33 bp, Homo Sapiens; identical to SEQ ID NO: 11318

SEQ ID NO: 46577 - DNA, 34 bp, Homo Sapiens; identical to SEQ ID NO: 11319

SEQ ID NO: 46578 - DNA, 35 bp, Homo Sapiens; identical to SEQ ID NO: 11320

SEQ ID NO: 46579 - DNA, 41 bp, Homo Sapiens; identical to SEQ ID NO: 11326

SEQ ID NO: 46580 - DNA, 43 bp, Homo Sapiens; identical to SEQ ID NO: 35270

SEQ ID NO: 46581 - DNA, 44 bp, Homo Sapiens; identical to SEQ ID NO: 11327

SEQ ID NO: 46582 - DNA, 47 bp, Homo Sapiens; identical to SEQ ID NO: 11328

SEQ ID NO: 46583 - DNA, 16 bp, Homo Sapiens
ccgtgcgagaatacca

SEQ ID NO: 46584 - DNA, 21 bp, Homo Sapiens
cctaagccagggattgtgggt

SEQ ID NO: 46585 - DNA, 42 bp, Homo Sapiens; identical to SEQ ID NO: 11347

SEQ ID NO: 46586 - DNA, 40 bp, Homo Sapiens; identical to SEQ ID NO: 35278

SEQ ID NO: 46587 - DNA, 16 bp, Homo Sapiens
cctacccagggacgcc

SEQ ID NO: 46588 - DNA, 16 bp, Homo Sapiens
cctatatatcttacca

SEQ ID NO: 46589 - DNA, 16 bp, Homo Sapiens
cctcacacggggcacc

SEQ ID NO: 46590 - DNA, 17 bp, Homo Sapiens
cctcacacggggcacca

SEQ ID NO: 46591 - DNA, 16 bp, Homo Sapiens
cctcacctggagcacc

SEQ ID NO: 46592 - DNA, 17 bp, Homo Sapiens
cctcacctggagcacca

SEQ ID NO: 46593 - DNA, 16 bp, Homo Sapiens
cctcagagggggcacc

SEQ ID NO: 46594 - DNA, 17 bp, Homo Sapiens
cctcagagggggcacca

SEQ ID NO: 46595 - DNA, 29 bp, Homo Sapiens
cctcagtaagttgcaatacttaatttctg

SEQ ID NO: 46596 - DNA, 31 bp, Homo Sapiens; identical to SEQ ID NO: 11385

SEQ ID NO: 46597 - DNA, 32 bp, Homo Sapiens; identical to SEQ ID NO: 11386

SEQ ID NO: 46598 - DNA, 16 bp, Homo Sapiens
cctcgctggggcctcc

SEQ ID NO: 46599 - DNA, 27 bp, Homo Sapiens
cctcggttcgaatccgagtcacggcac

SEQ ID NO: 46600 - DNA, 16 bp, Homo Sapiens
cctctttacagtgacc

SEQ ID NO: 46601 - DNA, 17 bp, Homo Sapiens
cctctttacagtgacca

SEQ ID NO: 46602 - DNA, 19 bp, Homo Sapiens
cctgccacgcgggaggccc

SEQ ID NO: 46603 - DNA, 23 bp, Homo Sapiens
cctgccacgcgggaggcccgggt

SEQ ID NO: 46604 - DNA, 44 bp, Homo Sapiens
cctgccacgcgggaggcccgggttcgattcccggccaatgcacc

SEQ ID NO: 46605 - DNA, 16 bp, Homo Sapiens
cctgccgactacgcca

SEQ ID NO: 46606 - DNA, 16 bp, Homo Sapiens
cctgccgcggtcgcca

SEQ ID NO: 46607 - DNA, 16 bp, Homo Sapiens
cctgccggggcttcca

SEQ ID NO: 46608 - DNA, 16 bp, Homo Sapiens
cctgctcacagcgcca

SEQ ID NO: 46609 - DNA, 16 bp, Homo Sapiens
cctgctcgctgcgcca

SEQ ID NO: 46610 - DNA, 16 bp, Homo Sapiens
cctggctggctcgcca

SEQ ID NO: 46611 - DNA, 27 bp, Homo Sapiens
cctgggttcgaatcccagcggtgcctc

SEQ ID NO: 46612 - DNA, 28 bp, Homo Sapiens
cctgggttcgagccccagtggaaccacc

SEQ ID NO: 46613 - DNA, 31 bp, Homo Sapiens; identical to SEQ ID NO: 11479

SEQ ID NO: 46614 - DNA, 24 bp, Homo Sapiens
cctggtggtctagtggttaggatt

SEQ ID NO: 46615 - DNA, 25 bp, Homo Sapiens
cctggtggtctagtggttaggattc

SEQ ID NO: 46616 - DNA, 26 bp, Homo Sapiens
cctggtggtctagtggttaggattcg

SEQ ID NO: 46617 - DNA, 27 bp, Homo Sapiens
cctggtggtctagtggttaggattcgg

SEQ ID NO: 46618 - DNA, 28 bp, Homo Sapiens
cctggtggtctagtggttaggattcggc

SEQ ID NO: 46619 - DNA, 29 bp, Homo Sapiens
cctggtggtctagtggttaggattcggcg

SEQ ID NO: 46620 - DNA, 30 bp, Homo Sapiens; identical to SEQ ID NO: 11496

SEQ ID NO: 46621 - DNA, 31 bp, Homo Sapiens; identical to SEQ ID NO: 11497

SEQ ID NO: 46622 - DNA, 32 bp, Homo Sapiens; identical to SEQ ID NO: 11498

SEQ ID NO: 46623 - DNA, 33 bp, Homo Sapiens; identical to SEQ ID NO: 11499

SEQ ID NO: 46624 - DNA, 34 bp, Homo Sapiens; identical to SEQ ID NO: 11500

SEQ ID NO: 46625 - DNA, 40 bp, Homo Sapiens; identical to SEQ ID NO: 11506

SEQ ID NO: 46626 - DNA, 26 bp, Homo Sapiens
cctggttcgatcccgggtttcggcac

SEQ ID NO: 46627 - DNA, 27 bp, Homo Sapiens
cctggttcgatcccgggtttcggcacc

SEQ ID NO: 46628 - DNA, 47 bp, Homo Sapiens; identical to SEQ ID NO: 35333

SEQ ID NO: 46629 - DNA, 16 bp, Homo Sapiens
cctgtcacgcgggaga

SEQ ID NO: 46630 - DNA, 17 bp, Homo Sapiens
cctgtcacgcgggagac

SEQ ID NO: 46631 - DNA, 18 bp, Homo Sapiens
cctgtcacgcgggagacc

SEQ ID NO: 46632 - DNA, 19 bp, Homo Sapiens
cctgtcacgcgggagaccg

SEQ ID NO: 46633 - DNA, 20 bp, Homo Sapiens
cctgtcacgcgggagaccgg

SEQ ID NO: 46634 - DNA, 21 bp, Homo Sapiens
cctgtcacgcgggagaccggg

SEQ ID NO: 46635 - DNA, 22 bp, Homo Sapiens
cctgtcacgcgggagaccgggg

SEQ ID NO: 46636 - DNA, 23 bp, Homo Sapiens
cctgtcacgcgggagaccggggt

SEQ ID NO: 46637 - DNA, 24 bp, Homo Sapiens
cctgtcacgcgggagaccggggtt

SEQ ID NO: 46638 - DNA, 39 bp, Homo Sapiens; identical to SEQ ID NO: 11521

SEQ ID NO: 46639 - DNA, 43 bp, Homo Sapiens; identical to SEQ ID NO: 11522

SEQ ID NO: 46640 - DNA, 44 bp, Homo Sapiens; identical to SEQ ID NO: 11523

SEQ ID NO: 46641 - DNA, 45 bp, Homo Sapiens; identical to SEQ ID NO: 11524

SEQ ID NO: 46642 - DNA, 29 bp, Homo Sapiens
cctgtcacgcgggagaccggggttcgatt

SEQ ID NO: 46643 - DNA, 30 bp, Homo Sapiens
cctgtcacgcgggagaccggggttcgattc

SEQ ID NO: 46644 - DNA, 32 bp, Homo Sapiens
cctgtcacgcgggagaccggggttcgattccc

SEQ ID NO: 46645 - DNA, 33 bp, Homo Sapiens
cctgtcacgcgggagaccggggttcgattcccc

SEQ ID NO: 46646 - DNA, 35 bp, Homo Sapiens; identical to SEQ ID NO: 35343

SEQ ID NO: 46647 - DNA, 39 bp, Homo Sapiens; identical to SEQ ID NO: 11527

SEQ ID NO: 46648 - DNA, 40 bp, Homo Sapiens; identical to SEQ ID NO: 11528

SEQ ID NO: 46649 - DNA, 41 bp, Homo Sapiens; identical to SEQ ID NO: 11529

SEQ ID NO: 46650 - DNA, 42 bp, Homo Sapiens; identical to SEQ ID NO: 11530

SEQ ID NO: 46651 - DNA, 43 bp, Homo Sapiens; identical to SEQ ID NO: 11531

SEQ ID NO: 46652 - DNA, 44 bp, Homo Sapiens; identical to SEQ ID NO: 11532

SEQ ID NO: 46653 - DNA, 45 bp, Homo Sapiens; identical to SEQ ID NO: 11533

SEQ ID NO: 46654 - DNA, 16 bp, Homo Sapiens
cctgtcggctacgcca

SEQ ID NO: 46655 - DNA, 16 bp, Homo Sapiens
cctgttcgtgacgcca

SEQ ID NO: 46656 - DNA, 35 bp, Homo Sapiens; identical to SEQ ID NO: 11540

SEQ ID NO: 46657 - DNA, 21 bp, Homo Sapiens
ccttccaagcagttgacccgg

SEQ ID NO: 46658 - DNA, 22 bp, Homo Sapiens
ccttccaagcagttgacccggg

SEQ ID NO: 46659 - DNA, 23 bp, Homo Sapiens
ccttccaagcagttgacccgggt

SEQ ID NO: 46660 - DNA, 24 bp, Homo Sapiens
ccttccaagcagttgacccgggtt

SEQ ID NO: 46661 - DNA, 16 bp, Homo Sapiens
ccttcccgtactacca

SEQ ID NO: 46662 - DNA, 16 bp, Homo Sapiens
ccttccttttttgcca

SEQ ID NO: 46663 - DNA, 16 bp, Homo Sapiens
ccttcgatagctcagc

SEQ ID NO: 46664 - DNA, 18 bp, Homo Sapiens
ccttcgatagctcagctg

SEQ ID NO: 46665 - DNA, 25 bp, Homo Sapiens
ccttcgatagctcagctggtagagc

SEQ ID NO: 46666 - DNA, 19 bp, Homo Sapiens
ccttcgatagctcagttgg

SEQ ID NO: 46667 - DNA, 25 bp, Homo Sapiens
ccttcgatagctcagttggtagagc

SEQ ID NO: 46668 - DNA, 33 bp, Homo Sapiens; identical to SEQ ID NO: 11581

SEQ ID NO: 46669 - DNA, 27 bp, Homo Sapiens
ccttttaagttaaagattaagagaacc

SEQ ID NO: 46670 - DNA, 28 bp, Homo Sapiens
ccttttaagttaaagattaagagaacca

SEQ ID NO: 46671 - DNA, 33 bp, Homo Sapiens; identical to SEQ ID NO: 11596

SEQ ID NO: 46672 - DNA, 16 bp, Homo Sapiens
cctttttccaaggaca

SEQ ID NO: 46673 - DNA, 17 bp, Homo Sapiens
cctttttccaaggacac

SEQ ID NO: 46674 - DNA, 18 bp, Homo Sapiens
cctttttccaaggacacc

SEQ ID NO: 46675 - DNA, 19 bp, Homo Sapiens
cctttttccaaggacacca

SEQ ID NO: 46676 - DNA, 16 bp, Homo Sapiens
cgaaaatgttggttat

SEQ ID NO: 46677 - DNA, 17 bp, Homo Sapiens
cgaaaatgttggttata

SEQ ID NO: 46678 - DNA, 19 bp, Homo Sapiens
cgaaaatgttggttatacc

SEQ ID NO: 46679 - DNA, 23 bp, Homo Sapiens
cgaaaatgttggttatacccttc

SEQ ID NO: 46680 - DNA, 26 bp, Homo Sapiens
cgaaaatgttggttatacccttcccg

SEQ ID NO: 46681 - DNA, 31 bp, Homo Sapiens; identical to SEQ ID NO: 11628

SEQ ID NO: 46682 - DNA, 32 bp, Homo Sapiens; identical to SEQ ID NO: 11629

SEQ ID NO: 46683 - DNA, 33 bp, Homo Sapiens; identical to SEQ ID NO: 11630

SEQ ID NO: 46684 - DNA, 34 bp, Homo Sapiens; identical to SEQ ID NO: 11631

SEQ ID NO: 46685 - DNA, 20 bp, Homo Sapiens
cgaaaccatcctctgctacc

SEQ ID NO: 46686 - DNA, 21 bp, Homo Sapiens
cgaaaccatcctctgctacca

SEQ ID NO: 46687 - DNA, 20 bp, Homo Sapiens
cgaaaccgggcagaagcacc

SEQ ID NO: 46688 - DNA, 21 bp, Homo Sapiens
cgaaaccgggcagaagcacca

SEQ ID NO: 46689 - DNA, 16 bp, Homo Sapiens
cgaaaccgggcggaaa

SEQ ID NO: 46690 - DNA, 17 bp, Homo Sapiens
cgaaaccgggcggaaac

SEQ ID NO: 46691 - DNA, 18 bp, Homo Sapiens
cgaaaccgggcggaaaca

SEQ ID NO: 46692 - DNA, 19 bp, Homo Sapiens
cgaaaccgggcggaaacac

SEQ ID NO: 46693 - DNA, 20 bp, Homo Sapiens
cgaaaccgggcggaaacacc

SEQ ID NO: 46694 - DNA, 21 bp, Homo Sapiens
cgaaaccgggcggaaacacca

SEQ ID NO: 46695 - DNA, 25 bp, Homo Sapiens
cgaaaggtccccggttcgaaaccgg

SEQ ID NO: 46696 - DNA, 30 bp, Homo Sapiens
cgaaaggtccccggttcgaaaccgggcgga

SEQ ID NO: 46697 - DNA, 33 bp, Homo Sapiens; identical to SEQ ID NO: 11647

SEQ ID NO: 46698 - DNA, 34 bp, Homo Sapiens; identical to SEQ ID NO: 11648

SEQ ID NO: 46699 - DNA, 35 bp, Homo Sapiens; identical to SEQ ID NO: 11649

SEQ ID NO: 46700 - DNA, 36 bp, Homo Sapiens; identical to SEQ ID NO: 11650

SEQ ID NO: 46701 - DNA, 36 bp, Homo Sapiens; identical to SEQ ID NO: 35414

SEQ ID NO: 46702 - DNA, 16 bp, Homo Sapiens
cgaaaggttggtggtt

SEQ ID NO: 46703 - DNA, 17 bp, Homo Sapiens
cgaaaggttggtggttc

SEQ ID NO: 46704 - DNA, 34 bp, Homo Sapiens; identical to SEQ ID NO: 11656

SEQ ID NO: 46705 - DNA, 35 bp, Homo Sapiens; identical to SEQ ID NO: 11657

SEQ ID NO: 46706 - DNA, 36 bp, Homo Sapiens; identical to SEQ ID NO: 11658

SEQ ID NO: 46707 - DNA, 37 bp, Homo Sapiens; identical to SEQ ID NO: 11659

SEQ ID NO: 46708 - DNA, 36 bp, Homo Sapiens; identical to SEQ ID NO: 11660

SEQ ID NO: 46709 - DNA, 21 bp, Homo Sapiens
cgaaatagctcagttgggaga

SEQ ID NO: 46710 - DNA, 17 bp, Homo Sapiens
cgaaccccgtccgtgcc

SEQ ID NO: 46711 - DNA, 18 bp, Homo Sapiens
cgaaccccgtccgtgcct

SEQ ID NO: 46712 - DNA, 19 bp, Homo Sapiens
cgaaccccgtccgtgcctc

SEQ ID NO: 46713 - DNA, 20 bp, Homo Sapiens
cgaaccctgctcgctgcgcc

SEQ ID NO: 46714 - DNA, 28 bp, Homo Sapiens
cgaagaagcagcttcaaacctgccgggg

SEQ ID NO: 46715 - DNA, 29 bp, Homo Sapiens
cgaagaagcagcttcaaacctgccggggc

SEQ ID NO: 46716 - DNA, 30 bp, Homo Sapiens; identical to SEQ ID NO: 11673

SEQ ID NO: 46717 - DNA, 31 bp, Homo Sapiens; identical to SEQ ID NO: 11674

SEQ ID NO: 46718 - DNA, 32 bp, Homo Sapiens; identical to SEQ ID NO: 11675

SEQ ID NO: 46719 - DNA, 33 bp, Homo Sapiens; identical to SEQ ID NO: 11676

SEQ ID NO: 46720 - DNA, 33 bp, Homo Sapiens; identical to SEQ ID NO: 11681

SEQ ID NO: 46721 - DNA, 33 bp, Homo Sapiens; identical to SEQ ID NO: 11687

SEQ ID NO: 46722 - DNA, 20 bp, Homo Sapiens
cgaatcacgtcggggtcacc

SEQ ID NO: 46723 - DNA, 21 bp, Homo Sapiens
cgaatcacgtcggggtcacca

SEQ ID NO: 46724 - DNA, 17 bp, Homo Sapiens
cgaatcccaccgctgcc

SEQ ID NO: 46725 - DNA, 18 bp, Homo Sapiens
cgaatcccaccgctgcca

SEQ ID NO: 46726 - DNA, 20 bp, Homo Sapiens
cgaatcccaccgctgccacc

SEQ ID NO: 46727 - DNA, 19 bp, Homo Sapiens
cgaatcccactcctgacac

SEQ ID NO: 46728 - DNA, 20 bp, Homo Sapiens
cgaatcccactcctgacacc

SEQ ID NO: 46729 - DNA, 21 bp, Homo Sapiens
cgaatcccactcctgacacca

SEQ ID NO: 46730 - DNA, 18 bp, Homo Sapiens
cgaatcccacttctgaca

SEQ ID NO: 46731 - DNA, 20 bp, Homo Sapiens
cgaatcccacttctgacacc

SEQ ID NO: 46732 - DNA, 21 bp, Homo Sapiens
cgaatcccacttctgacacca

SEQ ID NO: 46733 - DNA, 19 bp, Homo Sapiens
cgaatcccagcggggcctc

SEQ ID NO: 46734 - DNA, 18 bp, Homo Sapiens
cgaatcccagcggtgcct

SEQ ID NO: 46735 - DNA, 19 bp, Homo Sapiens
cgaatcccagcggtgcctc

SEQ ID NO: 46736 - DNA, 20 bp, Homo Sapiens
cgaatcccagcggtgcctcc

SEQ ID NO: 46737 - DNA, 19 bp, Homo Sapiens
cgaatcccatcctcgtcgc

SEQ ID NO: 46738 - DNA, 20 bp, Homo Sapiens
cgaatcccatcctcgtcgcc

SEQ ID NO: 46739 - DNA, 21 bp, Homo Sapiens
cgaatcccatcctcgtcgcca

SEQ ID NO: 46740 - DNA, 17 bp, Homo Sapiens
cgaatccgagtcacggc

SEQ ID NO: 46741 - DNA, 19 bp, Homo Sapiens
cgaatccgagtcacggcac

SEQ ID NO: 46742 - DNA, 20 bp, Homo Sapiens
cgaatccgagtcacggcacc

SEQ ID NO: 46743 - DNA, 21 bp, Homo Sapiens
cgaatccgagtcacggcacca

SEQ ID NO: 46744 - DNA, 19 bp, Homo Sapiens
cgaatccggctcgaaggac

SEQ ID NO: 46745 - DNA, 20 bp, Homo Sapiens
cgaatccggctcgaaggacc

SEQ ID NO: 46746 - DNA, 20 bp, Homo Sapiens
cgaatccggctcggaggacc

SEQ ID NO: 46747 - DNA, 20 bp, Homo Sapiens
cgaatcctgccgactacgcc

SEQ ID NO: 46748 - DNA, 20 bp, Homo Sapiens
cgaatcctgttcgtgacgcc

SEQ ID NO: 46749 - DNA, 16 bp, Homo Sapiens
cgaatgatttcgactc

SEQ ID NO: 46750 - DNA, 18 bp, Homo Sapiens
cgaccccttatttacccc

SEQ ID NO: 46751 - DNA, 19 bp, Homo Sapiens
cgactcccggtatgggaac

SEQ ID NO: 46752 - DNA, 16 bp, Homo Sapiens
cgactcccggtgtggg

SEQ ID NO: 46753 - DNA, 17 bp, Homo Sapiens
cgactcccggtgtggga

SEQ ID NO: 46754 - DNA, 18 bp, Homo Sapiens
cgactcccggtgtgggaa

SEQ ID NO: 46755 - DNA, 19 bp, Homo Sapiens
cgactcccggtgtgggaac

SEQ ID NO: 46756 - DNA, 20 bp, Homo Sapiens
cgactcccggtgtgggaacc

SEQ ID NO: 46757 - DNA, 21 bp, Homo Sapiens
cgactcccggtgtgggaacca

SEQ ID NO: 46758 - DNA, 17 bp, Homo Sapiens
cgactcctggctggctc

SEQ ID NO: 46759 - DNA, 18 bp, Homo Sapiens
cgactcctggctggctcg

SEQ ID NO: 46760 - DNA, 19 bp, Homo Sapiens
cgactcctggctggctcgc

SEQ ID NO: 46761 - DNA, 20 bp, Homo Sapiens
cgactcctggctggctcgcc

SEQ ID NO: 46762 - DNA, 21 bp, Homo Sapiens
cgactcctggctggctcgcca

SEQ ID NO: 46763 - DNA, 32 bp, Homo Sapiens; identical to SEQ ID NO: 11786

SEQ ID NO: 46764 - DNA, 33 bp, Homo Sapiens; identical to SEQ ID NO: 11787

SEQ ID NO: 46765 - DNA, 34 bp, Homo Sapiens; identical to SEQ ID NO: 11788

SEQ ID NO: 46766 - DNA, 35 bp, Homo Sapiens; identical to SEQ ID NO: 11789

SEQ ID NO: 46767 - DNA, 36 bp, Homo Sapiens; identical to SEQ ID NO: 11790

SEQ ID NO: 46768 - DNA, 37 bp, Homo Sapiens; identical to SEQ ID NO: 11791

SEQ ID NO: 46769 - DNA, 20 bp, Homo Sapiens
cgagcccacccagggacgcc

SEQ ID NO: 46770 - DNA, 17 bp, Homo Sapiens
cgagccccagtggaacc

SEQ ID NO: 46771 - DNA, 18 bp, Homo Sapiens
cgagccccagtggaacca

SEQ ID NO: 46772 - DNA, 19 bp, Homo Sapiens
cgagccccagtggaaccac

SEQ ID NO: 46773 - DNA, 20 bp, Homo Sapiens
cgagccccagtggaaccacc

SEQ ID NO: 46774 - DNA, 21 bp, Homo Sapiens
cgagccccagtggaaccacca

SEQ ID NO: 46775 - DNA, 19 bp, Homo Sapiens
cgagcctcacctggagcac

SEQ ID NO: 46776 - DNA, 19 bp, Homo Sapiens
cgagcggtctaaggcgctg

SEQ ID NO: 46777 - DNA, 23 bp, Homo Sapiens
cgagcggtctaaggcgctggatt

SEQ ID NO: 46778 - DNA, 29 bp, Homo Sapiens
cgaggccccgggttcaatccccggcacct

SEQ ID NO: 46779 - DNA, 34 bp, Homo Sapiens; identical to SEQ ID NO: 35529

SEQ ID NO: 46780 - DNA, 35 bp, Homo Sapiens
cgaggccccgggttcaatccccggcacctccacca

SEQ ID NO: 46781 - DNA, 22 bp, Homo Sapiens
cgaggtggccgagtggttaagg

SEQ ID NO: 46782 - DNA, 20 bp, Homo Sapiens
cgagtcccacctggggtacc

SEQ ID NO: 46783 - DNA, 21 bp, Homo Sapiens
cgagtcccatctggggtgcca

SEQ ID NO: 46784 - DNA, 20 bp, Homo Sapiens
cgagtcccttcgtggtcgcc

SEQ ID NO: 46785 - DNA, 19 bp, Homo Sapiens
cgagtcctgccgcggtcgc

SEQ ID NO: 46786 - DNA, 20 bp, Homo Sapiens
cgagtcctgccgcggtcgcc

SEQ ID NO: 46787 - DNA, 25 bp, Homo Sapiens
cgagttcaaatctcgctggggcctc

SEQ ID NO: 46788 - DNA, 24 bp, Homo Sapiens
cgagttcaaatctcggtggaacct

SEQ ID NO: 46789 - DNA, 25 bp, Homo Sapiens
cgagttcaaatctcggtggaacctc

SEQ ID NO: 46790 - DNA, 24 bp, Homo Sapiens
cgagttcaaatctcggtgggacct

SEQ ID NO: 46791 - DNA, 25 bp, Homo Sapiens
cgagttcaaatctcggtgggacctc

SEQ ID NO: 46792 - DNA, 26 bp, Homo Sapiens
cgagttcaaatctcggtgggacctcc

SEQ ID NO: 46793 - DNA, 20 bp, Homo Sapiens
cgatccccagcatctccacc

SEQ ID NO: 46794 - DNA, 16 bp, Homo Sapiens
cgatccccggcacctc

SEQ ID NO: 46795 - DNA, 20 bp, Homo Sapiens
cgatccccggcatctccacc

SEQ ID NO: 46796 - DNA, 21 bp, Homo Sapiens
cgatccccggcatctccacca

SEQ ID NO: 46797 - DNA, 19 bp, Homo Sapiens
cgatccccgtacgggccac

SEQ ID NO: 46798 - DNA, 20 bp, Homo Sapiens
cgatccccgtacgggccacc

SEQ ID NO: 46799 - DNA, 20 bp, Homo Sapiens
cgatccccgtactggccacc

SEQ ID NO: 46800 - DNA, 20 bp, Homo Sapiens
cgatcccgggcggaaacacc

SEQ ID NO: 46801 - DNA, 18 bp, Homo Sapiens
cgatcccgggtttcggca

SEQ ID NO: 46802 - DNA, 19 bp, Homo Sapiens
cgatcccgggtttcggcac

SEQ ID NO: 46803 - DNA, 20 bp, Homo Sapiens
cgatcccgggtttcggcacc

SEQ ID NO: 46804 - DNA, 21 bp, Homo Sapiens
cgatcccgggtttcggcacca

SEQ ID NO: 46805 - DNA, 29 bp, Homo Sapiens
cgatccgagttcaaatctcggtgggacct

SEQ ID NO: 46806 - DNA, 30 bp, Homo Sapiens; identical to SEQ ID NO: 11877

SEQ ID NO: 46807 - DNA, 19 bp, Homo Sapiens
cgatcctcacctggagcac

SEQ ID NO: 46808 - DNA, 20 bp, Homo Sapiens
cgatcctcacctggagcacc

SEQ ID NO: 46809 - DNA, 19 bp, Homo Sapiens
cgatgcccgcatcctccac

SEQ ID NO: 46810 - DNA, 28 bp, Homo Sapiens
cgatggatcgaaaccatcctctgctacc

SEQ ID NO: 46811 - DNA, 37 bp, Homo Sapiens; identical to SEQ ID NO: 11904

SEQ ID NO: 46812 - DNA, 16 bp, Homo Sapiens
cgattccccgacgggg

SEQ ID NO: 46813 - DNA, 17 bp, Homo Sapiens
cgattccccgacgggga

SEQ ID NO: 46814 - DNA, 18 bp, Homo Sapiens
cgattccccgacggggag

SEQ ID NO: 46815 - DNA, 19 bp, Homo Sapiens
cgattccccgacggggagc

SEQ ID NO: 46816 - DNA, 20 bp, Homo Sapiens
cgattccccgacggggagcc

SEQ ID NO: 46817 - DNA, 21 bp, Homo Sapiens
cgattccccgacggggagcca

SEQ ID NO: 46818 - DNA, 16 bp, Homo Sapiens
cgattcccggccaacg

SEQ ID NO: 46819 - DNA, 17 bp, Homo Sapiens
cgattcccggccaacgc

SEQ ID NO: 46820 - DNA, 19 bp, Homo Sapiens
cgattcccggccaacgcac

SEQ ID NO: 46821 - DNA, 20 bp, Homo Sapiens
cgattcccggccaacgcacc

SEQ ID NO: 46822 - DNA, 21 bp, Homo Sapiens
cgattcccggccaacgcacca

SEQ ID NO: 46823 - DNA, 18 bp, Homo Sapiens
cgattcccggccaatgca

SEQ ID NO: 46824 - DNA, 19 bp, Homo Sapiens
cgattcccggccaatgcac

SEQ ID NO: 46825 - DNA, 20 bp, Homo Sapiens
cgattcccggccaatgcacc

SEQ ID NO: 46826 - DNA, 21 bp, Homo Sapiens
cgattcccggccaatgcacca

SEQ ID NO: 46827 - DNA, 20 bp, Homo Sapiens
cgattcccggcccatgcacc

SEQ ID NO: 46828 - DNA, 21 bp, Homo Sapiens
cgattcccggcccatgcacca

SEQ ID NO: 46829 - DNA, 16 bp, Homo Sapiens
cgattcccgggcggcg

SEQ ID NO: 46830 - DNA, 17 bp, Homo Sapiens
cgattcccgggcggcgc

SEQ ID NO: 46831 - DNA, 18 bp, Homo Sapiens
cgattcccgggcggcgca

SEQ ID NO: 46832 - DNA, 19 bp, Homo Sapiens
cgattcccgggcggcgcac

SEQ ID NO: 46833 - DNA, 20 bp, Homo Sapiens
cgattcccgggcggcgcacc

SEQ ID NO: 46834 - DNA, 21 bp, Homo Sapiens
cgattcccgggcggcgcacca

SEQ ID NO: 46835 - DNA, 16 bp, Homo Sapiens
cgattcccggtcaggg

SEQ ID NO: 46836 - DNA, 19 bp, Homo Sapiens
cgattcccggtcagggaac

SEQ ID NO: 46837 - DNA, 20 bp, Homo Sapiens
cgattcccggtcagggaacc

SEQ ID NO: 46838 - DNA, 19 bp, Homo Sapiens
cgattccggctcgaaggac

SEQ ID NO: 46839 - DNA, 20 bp, Homo Sapiens
cgattccggctcgaaggacc

SEQ ID NO: 46840 - DNA, 21 bp, Homo Sapiens
cgattccggctcgaaggacca

SEQ ID NO: 46841 - DNA, 18 bp, Homo Sapiens
cgattctcatagtcctag

SEQ ID NO: 46842 - DNA, 19 bp, Homo Sapiens
cgattctcatagtcctagc

SEQ ID NO: 46843 - DNA, 20 bp, Homo Sapiens
cgattctcatagtcctagcc

SEQ ID NO: 46844 - DNA, 21 bp, Homo Sapiens
cgattctcatagtcctagcca

SEQ ID NO: 46845 - DNA, 23 bp, Homo Sapiens
cgcaatggataacgcgtctgact

SEQ ID NO: 46846 - DNA, 19 bp, Homo Sapiens
cgcaatggatagcgcattg

SEQ ID NO: 46847 - DNA, 25 bp, Homo Sapiens
cgcaatggatagcgcattggacttc

SEQ ID NO: 46848 - DNA, 16 bp, Homo Sapiens
cgcacgttgggcgcca

SEQ ID NO: 46849 - DNA, 34 bp, Homo Sapiens; identical to SEQ ID NO: 11951

SEQ ID NO: 46850 - DNA, 35 bp, Homo Sapiens; identical to SEQ ID NO: 11952

SEQ ID NO: 46851 - DNA, 36 bp, Homo Sapiens; identical to SEQ ID NO: 11953

SEQ ID NO: 46852 - DNA, 37 bp, Homo Sapiens; identical to SEQ ID NO: 11954

SEQ ID NO: 46853 - DNA, 38 bp, Homo Sapiens; identical to SEQ ID NO: 11955

SEQ ID NO: 46854 - DNA, 39 bp, Homo Sapiens; identical to SEQ ID NO: 11956

SEQ ID NO: 46855 - DNA, 33 bp, Homo Sapiens; identical to SEQ ID NO: 11964

SEQ ID NO: 46856 - DNA, 34 bp, Homo Sapiens; identical to SEQ ID NO: 11965

SEQ ID NO: 46857 - DNA, 35 bp, Homo Sapiens; identical to SEQ ID NO: 11966

SEQ ID NO: 46858 - DNA, 36 bp, Homo Sapiens; identical to SEQ ID NO: 11967

SEQ ID NO: 46859 - DNA, 37 bp, Homo Sapiens; identical to SEQ ID NO: 11968

SEQ ID NO: 46860 - DNA, 21 bp, Homo Sapiens
cgcagcggaagcgtgctgggc

SEQ ID NO: 46861 - DNA, 22 bp, Homo Sapiens
cgcagcggaagcgtgctgggcc

SEQ ID NO: 46862 - DNA, 23 bp, Homo Sapiens
cgcagcggaagcgtgctgggccc

SEQ ID NO: 46863 - DNA, 32 bp, Homo Sapiens; identical to SEQ ID NO: 11998

SEQ ID NO: 46864 - DNA, 33 bp, Homo Sapiens; identical to SEQ ID NO: 11999

SEQ ID NO: 46865 - DNA, 17 bp, Homo Sapiens
cgcattggacttctaat

SEQ ID NO: 46866 - DNA, 19 bp, Homo Sapiens
cgcattggtggttcagtgg

SEQ ID NO: 46867 - DNA, 31 bp, Homo Sapiens; identical to SEQ ID NO: 12010

SEQ ID NO: 46868 - DNA, 32 bp, Homo Sapiens; identical to SEQ ID NO: 12011

SEQ ID NO: 46869 - DNA, 33 bp, Homo Sapiens; identical to SEQ ID NO: 12012

SEQ ID NO: 46870 - DNA, 34 bp, Homo Sapiens; identical to SEQ ID NO: 12013

SEQ ID NO: 46871 - DNA, 37 bp, Homo Sapiens; identical to SEQ ID NO: 12023

SEQ ID NO: 46872 - DNA, 31 bp, Homo Sapiens
cgccaaggtcgcgggttcgatccccgtacgg

SEQ ID NO: 46873 - DNA, 32 bp, Homo Sapiens; identical to SEQ ID NO: 12027

SEQ ID NO: 46874 - DNA, 33 bp, Homo Sapiens; identical to SEQ ID NO: 12028

SEQ ID NO: 46875 - DNA, 34 bp, Homo Sapiens
cgccaaggtcgcgggttcgatccccgtacgggcc

SEQ ID NO: 46876 - DNA, 36 bp, Homo Sapiens; identical to SEQ ID NO: 35645

SEQ ID NO: 46877 - DNA, 37 bp, Homo Sapiens; identical to SEQ ID NO: 12030

SEQ ID NO: 46878 - DNA, 38 bp, Homo Sapiens; identical to SEQ ID NO: 12031

SEQ ID NO: 46879 - DNA, 32 bp, Homo Sapiens; identical to SEQ ID NO: 12032

SEQ ID NO: 46880 - DNA, 37 bp, Homo Sapiens; identical to SEQ ID NO: 12033

SEQ ID NO: 46881 - DNA, 38 bp, Homo Sapiens
cgccaaggtcgcgggttcgatccccgtactggccacca

SEQ ID NO: 46882 - DNA, 33 bp, Homo Sapiens; identical to SEQ ID NO: 12041

SEQ ID NO: 46883 - DNA, 34 bp, Homo Sapiens; identical to SEQ ID NO: 12048

SEQ ID NO: 46884 - DNA, 34 bp, Homo Sapiens; identical to SEQ ID NO: 12054

SEQ ID NO: 46885 - DNA, 16 bp, Homo Sapiens
cgccgcggcccgggtt

SEQ ID NO: 46886 - DNA, 21 bp, Homo Sapiens
cgccgcggcccgggttcgatt

SEQ ID NO: 46887 - DNA, 24 bp, Homo Sapiens
cgccgcggcccgggttcgattccc

SEQ ID NO: 46888 - DNA, 27 bp, Homo Sapiens
cgccgcggcccgggttcgattcccggt

SEQ ID NO: 46889 - DNA, 28 bp, Homo Sapiens
cgccgcggcccgggttcgattcccggtc

SEQ ID NO: 46890 - DNA, 29 bp, Homo Sapiens
cgccgcggcccgggttcgattcccggtca

SEQ ID NO: 46891 - DNA, 30 bp, Homo Sapiens; identical to SEQ ID NO: 12073

SEQ ID NO: 46892 - DNA, 31 bp, Homo Sapiens; identical to SEQ ID NO: 12074

SEQ ID NO: 46893 - DNA, 32 bp, Homo Sapiens; identical to SEQ ID NO: 12076

SEQ ID NO: 46894 - DNA, 33 bp, Homo Sapiens; identical to SEQ ID NO: 12077

SEQ ID NO: 46895 - DNA, 34 bp, Homo Sapiens; identical to SEQ ID NO: 12078

SEQ ID NO: 46896 - DNA, 35 bp, Homo Sapiens; identical to SEQ ID NO: 12079

SEQ ID NO: 46897 - DNA, 36 bp, Homo Sapiens; identical to SEQ ID NO: 12080

SEQ ID NO: 46898 - DNA, 37 bp, Homo Sapiens; identical to SEQ ID NO: 12081

SEQ ID NO: 46899 - DNA, 17 bp, Homo Sapiens
cgccgctggtgtagtgg

SEQ ID NO: 46900 - DNA, 26 bp, Homo Sapiens
cgccgctggtgtagtggtatcatgca

SEQ ID NO: 46901 - DNA, 28 bp, Homo Sapiens
cgccgctggtgtagtggtatcatgcaag

SEQ ID NO: 46902 - DNA, 29 bp, Homo Sapiens
cgccgctggtgtagtggtatcatgcaaga

SEQ ID NO: 46903 - DNA, 31 bp, Homo Sapiens; identical to SEQ ID NO: 12092

SEQ ID NO: 46904 - DNA, 38 bp, Homo Sapiens; identical to SEQ ID NO: 12098

SEQ ID NO: 46905 - DNA, 22 bp, Homo Sapiens
cgccgtgatcgtatagtggtta

SEQ ID NO: 46906 - DNA, 31 bp, Homo Sapiens; identical to SEQ ID NO: 12106

SEQ ID NO: 46907 - DNA, 32 bp, Homo Sapiens; identical to SEQ ID NO: 12107

SEQ ID NO: 46908 - DNA, 33 bp, Homo Sapiens; identical to SEQ ID NO: 12108

SEQ ID NO: 46909 - DNA, 34 bp, Homo Sapiens; identical to SEQ ID NO: 12109

SEQ ID NO: 46910 - DNA, 35 bp, Homo Sapiens; identical to SEQ ID NO: 12110

SEQ ID NO: 46911 - DNA, 16 bp, Homo Sapiens
cgcctgtcacgcggga

SEQ ID NO: 46912 - DNA, 19 bp, Homo Sapiens
cgcctgtcacgcgggagac

SEQ ID NO: 46913 - DNA, 20 bp, Homo Sapiens
cgcctgtcacgcgggagacc

SEQ ID NO: 46914 - DNA, 21 bp, Homo Sapiens
cgcctgtcacgcgggagaccg

SEQ ID NO: 46915 - DNA, 22 bp, Homo Sapiens
cgcctgtcacgcgggagaccgg

SEQ ID NO: 46916 - DNA, 23 bp, Homo Sapiens
cgcctgtcacgcgggagaccggg

SEQ ID NO: 46917 - DNA, 41 bp, Homo Sapiens; identical to SEQ ID NO: 12129

SEQ ID NO: 46918 - DNA, 44 bp, Homo Sapiens; identical to SEQ ID NO: 12131

SEQ ID NO: 46919 - DNA, 45 bp, Homo Sapiens; identical to SEQ ID NO: 12132

SEQ ID NO: 46920 - DNA, 46 bp, Homo Sapiens; identical to SEQ ID NO: 12133

SEQ ID NO: 46921 - DNA, 37 bp, Homo Sapiens; identical to SEQ ID NO: 12135

SEQ ID NO: 46922 - DNA, 39 bp, Homo Sapiens; identical to SEQ ID NO: 12137

SEQ ID NO: 46923 - DNA, 40 bp, Homo Sapiens; identical to SEQ ID NO: 12138

SEQ ID NO: 46924 - DNA, 41 bp, Homo Sapiens; identical to SEQ ID NO: 12139

SEQ ID NO: 46925 - DNA, 42 bp, Homo Sapiens; identical to SEQ ID NO: 12140

SEQ ID NO: 46926 - DNA, 43 bp, Homo Sapiens; identical to SEQ ID NO: 12141

SEQ ID NO: 46927 - DNA, 44 bp, Homo Sapiens; identical to SEQ ID NO: 12142

SEQ ID NO: 46928 - DNA, 45 bp, Homo Sapiens; identical to SEQ ID NO: 12143

SEQ ID NO: 46929 - DNA, 46 bp, Homo Sapiens; identical to SEQ ID NO: 12144

SEQ ID NO: 46930 - DNA, 47 bp, Homo Sapiens; identical to SEQ ID NO: 12145

SEQ ID NO: 46931 - DNA, 36 bp, Homo Sapiens; identical to SEQ ID NO: 12156

SEQ ID NO: 46932 - DNA, 38 bp, Homo Sapiens; identical to SEQ ID NO: 12158

SEQ ID NO: 46933 - DNA, 39 bp, Homo Sapiens; identical to SEQ ID NO: 12159

SEQ ID NO: 46934 - DNA, 36 bp, Homo Sapiens; identical to SEQ ID NO: 12163

SEQ ID NO: 46935 - DNA, 38 bp, Homo Sapiens; identical to SEQ ID NO: 12164

SEQ ID NO: 46936 - DNA, 24 bp, Homo Sapiens
cgcggcccgggttcgattcccggt

SEQ ID NO: 46937 - DNA, 25 bp, Homo Sapiens
cgcggcccgggttcgattcccggtc

SEQ ID NO: 46938 - DNA, 27 bp, Homo Sapiens
cgcggcccgggttcgattcccggtcag

SEQ ID NO: 46939 - DNA, 30 bp, Homo Sapiens
cgcggcccgggttcgattcccggtcaggga

SEQ ID NO: 46940 - DNA, 31 bp, Homo Sapiens; identical to SEQ ID NO: 12193

SEQ ID NO: 46941 - DNA, 32 bp, Homo Sapiens; identical to SEQ ID NO: 12194

SEQ ID NO: 46942 - DNA, 33 bp, Homo Sapiens; identical to SEQ ID NO: 12195

SEQ ID NO: 46943 - DNA, 34 bp, Homo Sapiens; identical to SEQ ID NO: 12196

SEQ ID NO: 46944 - DNA, 32 bp, Homo Sapiens; identical to SEQ ID NO: 12207

SEQ ID NO: 46945 - DNA, 33 bp, Homo Sapiens; identical to SEQ ID NO: 12208

SEQ ID NO: 46946 - DNA, 35 bp, Homo Sapiens; identical to SEQ ID NO: 12210

SEQ ID NO: 46947 - DNA, 36 bp, Homo Sapiens; identical to SEQ ID NO: 12211

SEQ ID NO: 46948 - DNA, 37 bp, Homo Sapiens; identical to SEQ ID NO: 12212

SEQ ID NO: 46949 - DNA, 38 bp, Homo Sapiens; identical to SEQ ID NO: 12213

SEQ ID NO: 46950 - DNA, 19 bp, Homo Sapiens
cgcgggagaccggggttcg

SEQ ID NO: 46951 - DNA, 22 bp, Homo Sapiens
cgcgggagaccggggttcgatt

SEQ ID NO: 46952 - DNA, 27 bp, Homo Sapiens
cgcgggagaccggggttcgattccccg

SEQ ID NO: 46953 - DNA, 28 bp, Homo Sapiens
cgcgggagaccggggttcgattccccga

SEQ ID NO: 46954 - DNA, 29 bp, Homo Sapiens
cgcgggagaccggggttcgattccccgac

SEQ ID NO: 46955 - DNA, 30 bp, Homo Sapiens; identical to SEQ ID NO: 12222

SEQ ID NO: 46956 - DNA, 31 bp, Homo Sapiens; identical to SEQ ID NO: 12223

SEQ ID NO: 46957 - DNA, 32 bp, Homo Sapiens; identical to SEQ ID NO: 12224

SEQ ID NO: 46958 - DNA, 33 bp, Homo Sapiens; identical to SEQ ID NO: 12225

SEQ ID NO: 46959 - DNA, 34 bp, Homo Sapiens; identical to SEQ ID NO: 12226

SEQ ID NO: 46960 - DNA, 35 bp, Homo Sapiens; identical to SEQ ID NO: 12227

SEQ ID NO: 46961 - DNA, 36 bp, Homo Sapiens; identical to SEQ ID NO: 12228

SEQ ID NO: 46962 - DNA, 37 bp, Homo Sapiens; identical to SEQ ID NO: 12229

SEQ ID NO: 46963 - DNA, 38 bp, Homo Sapiens; identical to SEQ ID NO: 12230

SEQ ID NO: 46964 - DNA, 16 bp, Homo Sapiens
cgcgggaggcccgggt

SEQ ID NO: 46965 - DNA, 17 bp, Homo Sapiens
cgcgggaggcccgggtt

SEQ ID NO: 46966 - DNA, 29 bp, Homo Sapiens
cgcgggaggcccgggttcgattcccggcc

SEQ ID NO: 46967 - DNA, 31 bp, Homo Sapiens; identical to SEQ ID NO: 12239

SEQ ID NO: 46968 - DNA, 33 bp, Homo Sapiens; identical to SEQ ID NO: 12241

SEQ ID NO: 46969 - DNA, 34 bp, Homo Sapiens; identical to SEQ ID NO: 12242

SEQ ID NO: 46970 - DNA, 35 bp, Homo Sapiens; identical to SEQ ID NO: 12243

SEQ ID NO: 46971 - DNA, 36 bp, Homo Sapiens; identical to SEQ ID NO: 12244

SEQ ID NO: 46972 - DNA, 37 bp, Homo Sapiens; identical to SEQ ID NO: 12245

SEQ ID NO: 46973 - DNA, 38 bp, Homo Sapiens; identical to SEQ ID NO: 12246

SEQ ID NO: 46974 - DNA, 33 bp, Homo Sapiens; identical to SEQ ID NO: 12249

SEQ ID NO: 46975 - DNA, 37 bp, Homo Sapiens; identical to SEQ ID NO: 12251

SEQ ID NO: 46976 - DNA, 24 bp, Homo Sapiens
cgcgggttcgatccccgtacgggc

SEQ ID NO: 46977 - DNA, 25 bp, Homo Sapiens
cgcgggttcgatccccgtacgggcc

SEQ ID NO: 46978 - DNA, 26 bp, Homo Sapiens
cgcgggttcgatccccgtacgggcca

SEQ ID NO: 46979 - DNA, 27 bp, Homo Sapiens
cgcgggttcgatccccgtacgggccac

SEQ ID NO: 46980 - DNA, 28 bp, Homo Sapiens
cgcgggttcgatccccgtacgggccacc

SEQ ID NO: 46981 - DNA, 25 bp, Homo Sapiens
cgcgtgggttcgaaccccactcctg

SEQ ID NO: 46982 - DNA, 28 bp, Homo Sapiens
cgcgtgggttcgaatcccatcctcgtcg

SEQ ID NO: 46983 - DNA, 29 bp, Homo Sapiens
cgcgtgggttcgaatcccatcctcgtcgc

SEQ ID NO: 46984 - DNA, 30 bp, Homo Sapiens; identical to SEQ ID NO: 12289

SEQ ID NO: 46985 - DNA, 31 bp, Homo Sapiens; identical to SEQ ID NO: 12290

SEQ ID NO: 46986 - DNA, 25 bp, Homo Sapiens
cgcgttcgattcccggtcagggaac

SEQ ID NO: 46987 - DNA, 21 bp, Homo Sapiens
cgcgttcggctgttaaccgga

SEQ ID NO: 46988 - DNA, 43 bp, Homo Sapiens; identical to SEQ ID NO: 12305

SEQ ID NO: 46989 - DNA, 44 bp, Homo Sapiens; identical to SEQ ID NO: 12306

SEQ ID NO: 46990 - DNA, 46 bp, Homo Sapiens; identical to SEQ ID NO: 12308

SEQ ID NO: 46991 - DNA, 22 bp, Homo Sapiens
cgctggtgtagtggtatcatgc

SEQ ID NO: 46992 - DNA, 25 bp, Homo Sapiens
cgctggtgtagtggtatcatgcaag

SEQ ID NO: 46993 - DNA, 28 bp, Homo Sapiens
cgctggtgtagtggtatcatgcaagatt

SEQ ID NO: 46994 - DNA, 27 bp, Homo Sapiens
cgctggttcgaatccggctcgaaggac

SEQ ID NO: 46995 - DNA, 28 bp, Homo Sapiens
cgctggttcgaatccggctcgaaggacc

SEQ ID NO: 46996 - DNA, 29 bp, Homo Sapiens
cgctggttcgaatccggctcgaaggacca

SEQ ID NO: 46997 - DNA, 28 bp, Homo Sapiens
cgctggttcgaatccggctcggaggacc

SEQ ID NO: 46998 - DNA, 29 bp, Homo Sapiens
cgctggttcgaatccggctcggaggacca

SEQ ID NO: 46999 - DNA, 28 bp, Homo Sapiens
cgctggttcgattccagctcgaaggacc

SEQ ID NO: 47000 - DNA, 27 bp, Homo Sapiens
cgctggttcgattccggctcgaaggac

SEQ ID NO: 47001 - DNA, 28 bp, Homo Sapiens
cgctggttcgattccggctcgaaggacc

SEQ ID NO: 47002 - DNA, 29 bp, Homo Sapiens
cgctggttcgattccggctcgaaggacca

SEQ ID NO: 47003 - DNA, 45 bp, Homo Sapiens
cgcttcgggtgcgagaggtcccgggttcaaatcccggacgagccc

SEQ ID NO: 47004 - DNA, 34 bp, Homo Sapiens; identical to SEQ ID NO: 12342

SEQ ID NO: 47005 - DNA, 16 bp, Homo Sapiens
cggaagcgtgctgggc

SEQ ID NO: 47006 - DNA, 17 bp, Homo Sapiens
cggaagcgtgctgggcc

SEQ ID NO: 47007 - DNA, 18 bp, Homo Sapiens
cggaagcgtgctgggccc

SEQ ID NO: 47008 - DNA, 19 bp, Homo Sapiens
cggaagcgtgctgggccca

SEQ ID NO: 47009 - DNA, 20 bp, Homo Sapiens
cggaagcgtgctgggcccat

SEQ ID NO: 47010 - DNA, 21 bp, Homo Sapiens
cggaagcgtgctgggcccata

SEQ ID NO: 47011 - DNA, 22 bp, Homo Sapiens
cggaagcgtgctgggcccataa

SEQ ID NO: 47012 - DNA, 23 bp, Homo Sapiens
cggaagcgtgctgggcccataac

SEQ ID NO: 47013 - DNA, 24 bp, Homo Sapiens
cggaagcgtgctgggcccataacc

SEQ ID NO: 47014 - DNA, 25 bp, Homo Sapiens
cggaagcgtgctgggcccataaccc

SEQ ID NO: 47015 - DNA, 26 bp, Homo Sapiens
cggaagcgtgctgggcccataaccca

SEQ ID NO: 47016 - DNA, 27 bp, Homo Sapiens
cggaagcgtgctgggcccataacccag

SEQ ID NO: 47017 - DNA, 28 bp, Homo Sapiens
cggaagcgtgctgggcccataacccaga

SEQ ID NO: 47018 - DNA, 33 bp, Homo Sapiens; identical to SEQ ID NO: 12359

SEQ ID NO: 47019 - DNA, 34 bp, Homo Sapiens; identical to SEQ ID NO: 12360

SEQ ID NO: 47020 - DNA, 35 bp, Homo Sapiens; identical to SEQ ID NO: 12361

SEQ ID NO: 47021 - DNA, 36 bp, Homo Sapiens; identical to SEQ ID NO: 12362

SEQ ID NO: 47022 - DNA, 37 bp, Homo Sapiens; identical to SEQ ID NO: 12363

SEQ ID NO: 47023 - DNA, 38 bp, Homo Sapiens; identical to SEQ ID NO: 12364

SEQ ID NO: 47024 - DNA, 39 bp, Homo Sapiens; identical to SEQ ID NO: 12365

SEQ ID NO: 47025 - DNA, 40 bp, Homo Sapiens; identical to SEQ ID NO: 12366

SEQ ID NO: 47026 - DNA, 41 bp, Homo Sapiens; identical to SEQ ID NO: 12367

SEQ ID NO: 47027 - DNA, 44 bp, Homo Sapiens; identical to SEQ ID NO: 35779

SEQ ID NO: 47028 - DNA, 45 bp, Homo Sapiens; identical to SEQ ID NO: 35780

SEQ ID NO: 47029 - DNA, 46 bp, Homo Sapiens; identical to SEQ ID NO: 35781

SEQ ID NO: 47030 - DNA, 47 bp, Homo Sapiens; identical to SEQ ID NO: 35782

SEQ ID NO: 47031 - DNA, 25 bp, Homo Sapiens
cggaagcgtgctgggcccgtaaccc

SEQ ID NO: 47032 - DNA, 25 bp, Homo Sapiens
cggagaattttggattctcagggat

SEQ ID NO: 47033 - DNA, 26 bp, Homo Sapiens
cggagaattttggattctcagggatg

SEQ ID NO: 47034 - DNA, 31 bp, Homo Sapiens
cggagaattttggattctcagggatgggttc

SEQ ID NO: 47035 - DNA, 32 bp, Homo Sapiens; identical to SEQ ID NO: 12369

SEQ ID NO: 47036 - DNA, 34 bp, Homo Sapiens; identical to SEQ ID NO: 12370

SEQ ID NO: 47037 - DNA, 35 bp, Homo Sapiens; identical to SEQ ID NO: 35789

SEQ ID NO: 47038 - DNA, 36 bp, Homo Sapiens
cggagaattttggattctcagggatgggttcgattc

SEQ ID NO: 47039 - DNA, 37 bp, Homo Sapiens
cggagaattttggattctcagggatgggttcgattct

SEQ ID NO: 47040 - DNA, 45 bp, Homo Sapiens
cggagaattttggattctcagggatgggttcgattctcatagtcc

SEQ ID NO: 47041 - DNA, 46 bp, Homo Sapiens
cggagaattttggattctcagggatgggttcgattctcatagtcct

SEQ ID NO: 47042 - DNA, 47 bp, Homo Sapiens; identical to SEQ ID NO: 35790

SEQ ID NO: 47043 - DNA, 27 bp, Homo Sapiens
cggagatgaaaacctttttccaaggac

SEQ ID NO: 47044 - DNA, 28 bp, Homo Sapiens
cggagatgaaaacctttttccaaggaca

SEQ ID NO: 47045 - DNA, 29 bp, Homo Sapiens
cggagatgaaaacctttttccaaggacac

SEQ ID NO: 47046 - DNA, 30 bp, Homo Sapiens; identical to SEQ ID NO: 12384

SEQ ID NO: 47047 - DNA, 31 bp, Homo Sapiens; identical to SEQ ID NO: 12385

SEQ ID NO: 47048 - DNA, 16 bp, Homo Sapiens
cggagctggggattgt

SEQ ID NO: 47049 - DNA, 32 bp, Homo Sapiens; identical to SEQ ID NO: 12389

SEQ ID NO: 47050 - DNA, 41 bp, Homo Sapiens; identical to SEQ ID NO: 12391

SEQ ID NO: 47051 - DNA, 16 bp, Homo Sapiens
cggatagctcagtcgg

SEQ ID NO: 47052 - DNA, 19 bp, Homo Sapiens
cggatagctcagtcggtag

SEQ ID NO: 47053 - DNA, 20 bp, Homo Sapiens
cggatagctcagtcggtaga

SEQ ID NO: 47054 - DNA, 21 bp, Homo Sapiens
cggatagctcagtcggtagag

SEQ ID NO: 47055 - DNA, 22 bp, Homo Sapiens
cggatagctcagtcggtagagc

SEQ ID NO: 47056 - DNA, 23 bp, Homo Sapiens
cggatagctcagtcggtagagca

SEQ ID NO: 47057 - DNA, 24 bp, Homo Sapiens
cggatagctcagtcggtagagcat

SEQ ID NO: 47058 - DNA, 25 bp, Homo Sapiens
cggatagctcagtcggtagagcatc

SEQ ID NO: 47059 - DNA, 27 bp, Homo Sapiens
cggatagctcagtcggtagagcatcag

SEQ ID NO: 47060 - DNA, 28 bp, Homo Sapiens
cggatagctcagtcggtagagcatcaga

SEQ ID NO: 47061 - DNA, 29 bp, Homo Sapiens
cggatagctcagtcggtagagcatcagac

SEQ ID NO: 47062 - DNA, 30 bp, Homo Sapiens; identical to SEQ ID NO: 12409

SEQ ID NO: 47063 - DNA, 32 bp, Homo Sapiens; identical to SEQ ID NO: 12411

SEQ ID NO: 47064 - DNA, 33 bp, Homo Sapiens; identical to SEQ ID NO: 12417

SEQ ID NO: 47065 - DNA, 38 bp, Homo Sapiens
cggatcagaagattccaggttcgactcctggctggctc

SEQ ID NO: 47066 - DNA, 22 bp, Homo Sapiens
cggatcagaagattctaggttc

SEQ ID NO: 47067 - DNA, 16 bp, Homo Sapiens
cggatcagaagattga

SEQ ID NO: 47068 - DNA, 20 bp, Homo Sapiens
cggatcagaagattgagggt

SEQ ID NO: 47069 - DNA, 21 bp, Homo Sapiens
cggatcagaagattgagggtt

SEQ ID NO: 47070 - DNA, 22 bp, Homo Sapiens
cggatcagaagattgagggttc

SEQ ID NO: 47071 - DNA, 30 bp, Homo Sapiens; identical to SEQ ID NO: 12425

SEQ ID NO: 47072 - DNA, 32 bp, Homo Sapiens
cggatcagaagattgagggttcgagtcccttc

SEQ ID NO: 47073 - DNA, 22 bp, Homo Sapiens
cggatcagaagattgcaggttc

SEQ ID NO: 47074 - DNA, 16 bp, Homo Sapiens
cggatggaggcgtggg

SEQ ID NO: 47075 - DNA, 17 bp, Homo Sapiens
cggatggaggcgtgggt

SEQ ID NO: 47076 - DNA, 18 bp, Homo Sapiens
cggatggaggcgtgggtt

SEQ ID NO: 47077 - DNA, 29 bp, Homo Sapiens
cggatggaggcgtgggttcgaatcccact

SEQ ID NO: 47078 - DNA, 36 bp, Homo Sapiens; identical to SEQ ID NO: 12442

SEQ ID NO: 47079 - DNA, 37 bp, Homo Sapiens; identical to SEQ ID NO: 12443

SEQ ID NO: 47080 - DNA, 38 bp, Homo Sapiens; identical to SEQ ID NO: 12444

SEQ ID NO: 47081 - DNA, 17 bp, Homo Sapiens
cggcccgggttcgactc

SEQ ID NO: 47082 - DNA, 19 bp, Homo Sapiens
cggcccgggttcgactccc

SEQ ID NO: 47083 - DNA, 23 bp, Homo Sapiens
cggcccgggttcgactcccggtg

SEQ ID NO: 47084 - DNA, 25 bp, Homo Sapiens
cggcccgggttcgactcccggtgtg

SEQ ID NO: 47085 - DNA, 26 bp, Homo Sapiens
cggcccgggttcgactcccggtgtgg

SEQ ID NO: 47086 - DNA, 27 bp, Homo Sapiens
cggcccgggttcgactcccggtgtggg

SEQ ID NO: 47087 - DNA, 28 bp, Homo Sapiens
cggcccgggttcgactcccggtgtggga

SEQ ID NO: 47088 - DNA, 29 bp, Homo Sapiens
cggcccgggttcgactcccggtgtgggaa

SEQ ID NO: 47089 - DNA, 30 bp, Homo Sapiens; identical to SEQ ID NO: 12456

SEQ ID NO: 47090 - DNA, 31 bp, Homo Sapiens; identical to SEQ ID NO: 12457

SEQ ID NO: 47091 - DNA, 32 bp, Homo Sapiens; identical to SEQ ID NO: 12458

SEQ ID NO: 47092 - DNA, 22 bp, Homo Sapiens
cggcccgggttcgattcccggt

SEQ ID NO: 47093 - DNA, 23 bp, Homo Sapiens
cggcccgggttcgattcccggtc

SEQ ID NO: 47094 - DNA, 29 bp, Homo Sapiens
cggcccgggttcgattcccggtcagggaa

SEQ ID NO: 47095 - DNA, 30 bp, Homo Sapiens; identical to SEQ ID NO: 12467

SEQ ID NO: 47096 - DNA, 32 bp, Homo Sapiens; identical to SEQ ID NO: 12469

SEQ ID NO: 47097 - DNA, 46 bp, Homo Sapiens; identical to SEQ ID NO: 12481

SEQ ID NO: 47098 - DNA, 47 bp, Homo Sapiens; identical to SEQ ID NO: 12482

SEQ ID NO: 47099 - DNA, 16 bp, Homo Sapiens
cggctagctcagtcgg

SEQ ID NO: 47100 - DNA, 17 bp, Homo Sapiens
cggctagctcagtcggt

SEQ ID NO: 47101 - DNA, 21 bp, Homo Sapiens
cggctagctcagtcggtagag

SEQ ID NO: 47102 - DNA, 22 bp, Homo Sapiens
cggctagctcagtcggtagagc

SEQ ID NO: 47103 - DNA, 23 bp, Homo Sapiens
cggctagctcagtcggtagagca

SEQ ID NO: 47104 - DNA, 25 bp, Homo Sapiens
cggctagctcagtcggtagagcatg

SEQ ID NO: 47105 - DNA, 27 bp, Homo Sapiens
cggctagctcagtcggtagagcatgag

SEQ ID NO: 47106 - DNA, 29 bp, Homo Sapiens
cggctagctcagtcggtagagcatgagac

SEQ ID NO: 47107 - DNA, 30 bp, Homo Sapiens; identical to SEQ ID NO: 12504

SEQ ID NO: 47108 - DNA, 31 bp, Homo Sapiens; identical to SEQ ID NO: 12505

SEQ ID NO: 47109 - DNA, 32 bp, Homo Sapiens; identical to SEQ ID NO: 12506

SEQ ID NO: 47110 - DNA, 38 bp, Homo Sapiens; identical to SEQ ID NO: 12512

SEQ ID NO: 47111 - DNA, 39 bp, Homo Sapiens; identical to SEQ ID NO: 12513

SEQ ID NO: 47112 - DNA, 26 bp, Homo Sapiens
cggctagctcagtcggtagagcatgg

SEQ ID NO: 47113 - DNA, 27 bp, Homo Sapiens
cggctagctcagtcggtagagcatggg

SEQ ID NO: 47114 - DNA, 28 bp, Homo Sapiens
cggctagctcagtcggtagagcatggga

SEQ ID NO: 47115 - DNA, 29 bp, Homo Sapiens
cggctagctcagtcggtagagcatgggac

SEQ ID NO: 47116 - DNA, 30 bp, Homo Sapiens; identical to SEQ ID NO: 12521

SEQ ID NO: 47117 - DNA, 31 bp, Homo Sapiens; identical to SEQ ID NO: 12522

SEQ ID NO: 47118 - DNA, 32 bp, Homo Sapiens; identical to SEQ ID NO: 12523

SEQ ID NO: 47119 - DNA, 33 bp, Homo Sapiens; identical to SEQ ID NO: 12524

SEQ ID NO: 47120 - DNA, 36 bp, Homo Sapiens; identical to SEQ ID NO: 12527

SEQ ID NO: 47121 - DNA, 38 bp, Homo Sapiens; identical to SEQ ID NO: 12529

SEQ ID NO: 47122 - DNA, 39 bp, Homo Sapiens; identical to SEQ ID NO: 12530

SEQ ID NO: 47123 - DNA, 26 bp, Homo Sapiens
cggctgttaaccgaaagattggtggt

SEQ ID NO: 47124 - DNA, 26 bp, Homo Sapiens
cggctgttaaccgaaaggttggtggt

SEQ ID NO: 47125 - DNA, 27 bp, Homo Sapiens
cggctgttaaccgaaaggttggtggtt

SEQ ID NO: 47126 - DNA, 37 bp, Homo Sapiens
cggctgttaaccgaaaggttggtggttcgagcccacc

SEQ ID NO: 47127 - DNA, 38 bp, Homo Sapiens
cggctgttaaccgaaaggttggtggttcgagcccaccc

SEQ ID NO: 47128 - DNA, 46 bp, Homo Sapiens; identical to SEQ ID NO: 12539

SEQ ID NO: 47129 - DNA, 47 bp, Homo Sapiens; identical to SEQ ID NO: 12540

SEQ ID NO: 47130 - DNA, 16 bp, Homo Sapiens
cgggagaccggggttc

SEQ ID NO: 47131 - DNA, 30 bp, Homo Sapiens; identical to SEQ ID NO: 12546

SEQ ID NO: 47132 - DNA, 33 bp, Homo Sapiens; identical to SEQ ID NO: 12549

SEQ ID NO: 47133 - DNA, 34 bp, Homo Sapiens; identical to SEQ ID NO: 12550

SEQ ID NO: 47134 - DNA, 35 bp, Homo Sapiens; identical to SEQ ID NO: 12551

SEQ ID NO: 47135 - DNA, 36 bp, Homo Sapiens; identical to SEQ ID NO: 12552

SEQ ID NO: 47136 - DNA, 25 bp, Homo Sapiens
cgggagaccggggttcgattccccg

SEQ ID NO: 47137 - DNA, 26 bp, Homo Sapiens
cgggagaccggggttcgattccccga

SEQ ID NO: 47138 - DNA, 27 bp, Homo Sapiens
cgggagaccggggttcgattccccgac

SEQ ID NO: 47139 - DNA, 28 bp, Homo Sapiens
cgggagaccggggttcgattccccgacg

SEQ ID NO: 47140 - DNA, 29 bp, Homo Sapiens
cgggagaccggggttcgattccccgacgg

SEQ ID NO: 47141 - DNA, 30 bp, Homo Sapiens; identical to SEQ ID NO: 12559

SEQ ID NO: 47142 - DNA, 31 bp, Homo Sapiens; identical to SEQ ID NO: 12560

SEQ ID NO: 47143 - DNA, 32 bp, Homo Sapiens; identical to SEQ ID NO: 12561

SEQ ID NO: 47144 - DNA, 33 bp, Homo Sapiens; identical to SEQ ID NO: 12562

SEQ ID NO: 47145 - DNA, 34 bp, Homo Sapiens; identical to SEQ ID NO: 12563

SEQ ID NO: 47146 - DNA, 35 bp, Homo Sapiens; identical to SEQ ID NO: 12564

SEQ ID NO: 47147 - DNA, 36 bp, Homo Sapiens; identical to SEQ ID NO: 12565

SEQ ID NO: 47148 - DNA, 16 bp, Homo Sapiens
cgggaggcccgggttc

SEQ ID NO: 47149 - DNA, 25 bp, Homo Sapiens
cgggaggcccgggttcgattcccgg

SEQ ID NO: 47150 - DNA, 26 bp, Homo Sapiens
cgggaggcccgggttcgattcccggc

SEQ ID NO: 47151 - DNA, 27 bp, Homo Sapiens
cgggaggcccgggttcgattcccggcc

SEQ ID NO: 47152 - DNA, 29 bp, Homo Sapiens
cgggaggcccgggttcgattcccggccaa

SEQ ID NO: 47153 - DNA, 31 bp, Homo Sapiens; identical to SEQ ID NO: 12573

SEQ ID NO: 47154 - DNA, 32 bp, Homo Sapiens; identical to SEQ ID NO: 12574

SEQ ID NO: 47155 - DNA, 33 bp, Homo Sapiens; identical to SEQ ID NO: 12575

SEQ ID NO: 47156 - DNA, 34 bp, Homo Sapiens; identical to SEQ ID NO: 12576

SEQ ID NO: 47157 - DNA, 35 bp, Homo Sapiens; identical to SEQ ID NO: 12577

SEQ ID NO: 47158 - DNA, 36 bp, Homo Sapiens; identical to SEQ ID NO: 12578

SEQ ID NO: 47159 - DNA, 36 bp, Homo Sapiens; identical to SEQ ID NO: 12582

SEQ ID NO: 47160 - DNA, 26 bp, Homo Sapiens
cgggatcgatgcccgcatcctccacc

SEQ ID NO: 47161 - DNA, 16 bp, Homo Sapiens
cgggcccataccccga

SEQ ID NO: 47162 - DNA, 17 bp, Homo Sapiens
cgggcccataccccgaa

SEQ ID NO: 47163 - DNA, 18 bp, Homo Sapiens
cgggcccataccccgaaa

SEQ ID NO: 47164 - DNA, 47 bp, Homo Sapiens; identical to SEQ ID NO: 12606

SEQ ID NO: 47165 - DNA, 27 bp, Homo Sapiens
cggggttcaagtccctgttcgggcgcc

SEQ ID NO: 47166 - DNA, 26 bp, Homo Sapiens
cggggttcaattccccgacggggagc

SEQ ID NO: 47167 - DNA, 27 bp, Homo Sapiens
cggggttcaattccccgacggggagcc

SEQ ID NO: 47168 - DNA, 25 bp, Homo Sapiens
cggggttcgattccccgacggggag

SEQ ID NO: 47169 - DNA, 26 bp, Homo Sapiens
cggggttcgattccccgacggggagc

SEQ ID NO: 47170 - DNA, 27 bp, Homo Sapiens
cggggttcgattccccgacggggagcc

SEQ ID NO: 47171 - DNA, 26 bp, Homo Sapiens
cgggttcaatccccggcacctccacc

SEQ ID NO: 47172 - DNA, 26 bp, Homo Sapiens
cgggttcaatccccggcatctccacc

SEQ ID NO: 47173 - DNA, 25 bp, Homo Sapiens
cgggttcaattcccggtcagggaac

SEQ ID NO: 47174 - DNA, 25 bp, Homo Sapiens
cgggttcgaaccccgtccgtgcctc

SEQ ID NO: 47175 - DNA, 23 bp, Homo Sapiens
cgggttcgactcccggtatggga

SEQ ID NO: 47176 - DNA, 24 bp, Homo Sapiens
cgggttcgactcccggtatgggaa

SEQ ID NO: 47177 - DNA, 25 bp, Homo Sapiens
cgggttcgactcccggtatgggaac

SEQ ID NO: 47178 - DNA, 26 bp, Homo Sapiens
cgggttcgactcccggtatgggaacc

SEQ ID NO: 47179 - DNA, 18 bp, Homo Sapiens
cgggttcgactcccggtg

SEQ ID NO: 47180 - DNA, 20 bp, Homo Sapiens
cgggttcgactcccggtgtg

SEQ ID NO: 47181 - DNA, 21 bp, Homo Sapiens
cgggttcgactcccggtgtgg

SEQ ID NO: 47182 - DNA, 22 bp, Homo Sapiens
cgggttcgactcccggtgtggg

SEQ ID NO: 47183 - DNA, 23 bp, Homo Sapiens
cgggttcgactcccggtgtggga

SEQ ID NO: 47184 - DNA, 24 bp, Homo Sapiens
cgggttcgactcccggtgtgggaa

SEQ ID NO: 47185 - DNA, 25 bp, Homo Sapiens
cgggttcgactcccggtgtgggaac

SEQ ID NO: 47186 - DNA, 26 bp, Homo Sapiens
cgggttcgactcccggtgtgggaacc

SEQ ID NO: 47187 - DNA, 27 bp, Homo Sapiens
cgggttcgactcccggtgtgggaacca

SEQ ID NO: 47188 - DNA, 26 bp, Homo Sapiens
cgggttcgagtcccggcggagtcgcc

SEQ ID NO: 47189 - DNA, 25 bp, Homo Sapiens
cgggttcgatccccggcatctccac

SEQ ID NO: 47190 - DNA, 26 bp, Homo Sapiens
cgggttcgatccccggcatctccacc

SEQ ID NO: 47191 - DNA, 27 bp, Homo Sapiens
cgggttcgatccccggcatctccacca

SEQ ID NO: 47192 - DNA, 22 bp, Homo Sapiens
cgggttcgatccccgtacgggc

SEQ ID NO: 47193 - DNA, 23 bp, Homo Sapiens
cgggttcgatccccgtacgggcc

SEQ ID NO: 47194 - DNA, 24 bp, Homo Sapiens
cgggttcgatccccgtacgggcca

SEQ ID NO: 47195 - DNA, 25 bp, Homo Sapiens
cgggttcgatccccgtacgggccac

SEQ ID NO: 47196 - DNA, 26 bp, Homo Sapiens
cgggttcgatccccgtacgggccacc

SEQ ID NO: 47197 - DNA, 25 bp, Homo Sapiens
cgggttcgattcccggccagggaac

SEQ ID NO: 47198 - DNA, 21 bp, Homo Sapiens
cgggttcgattcccgggcggc

SEQ ID NO: 47199 - DNA, 22 bp, Homo Sapiens
cgggttcgattcccgggcggcg

SEQ ID NO: 47200 - DNA, 23 bp, Homo Sapiens
cgggttcgattcccgggcggcgc

SEQ ID NO: 47201 - DNA, 24 bp, Homo Sapiens
cgggttcgattcccgggcggcgca

SEQ ID NO: 47202 - DNA, 25 bp, Homo Sapiens
cgggttcgattcccgggcggcgcac

SEQ ID NO: 47203 - DNA, 26 bp, Homo Sapiens
cgggttcgattcccgggcggcgcacc

SEQ ID NO: 47204 - DNA, 22 bp, Homo Sapiens
cgggttcgattcccggtcaggg

SEQ ID NO: 47205 - DNA, 23 bp, Homo Sapiens
cgggttcgattcccggtcaggga

SEQ ID NO: 47206 - DNA, 24 bp, Homo Sapiens
cgggttcgattcccggtcagggaa

SEQ ID NO: 47207 - DNA, 25 bp, Homo Sapiens
cgggttcgattcccggtcagggaac

SEQ ID NO: 47208 - DNA, 26 bp, Homo Sapiens
cgggttcgattcccggtcagggaacc

SEQ ID NO: 47209 - DNA, 27 bp, Homo Sapiens
cgggttcgattcccggtcagggaacca

SEQ ID NO: 47210 - DNA, 25 bp, Homo Sapiens
cgggttcgattcccggtcatggaac

SEQ ID NO: 47211 - DNA, 20 bp, Homo Sapiens
cggtaatcgcataaaactta

SEQ ID NO: 47212 - DNA, 26 bp, Homo Sapiens
cggtaatcgcataaaacttaaaactt

SEQ ID NO: 47213 - DNA, 30 bp, Homo Sapiens; identical to SEQ ID NO: 12717

SEQ ID NO: 47214 - DNA, 39 bp, Homo Sapiens; identical to SEQ ID NO: 12726

SEQ ID NO: 47215 - DNA, 16 bp, Homo Sapiens
cggtagagcatcagac

SEQ ID NO: 47216 - DNA, 17 bp, Homo Sapiens
cggtagagcatcagact

SEQ ID NO: 47217 - DNA, 16 bp, Homo Sapiens
cggtagagcatgagac

SEQ ID NO: 47218 - DNA, 17 bp, Homo Sapiens
cggtagagcatgagact

SEQ ID NO: 47219 - DNA, 18 bp, Homo Sapiens
cggtagagcatgagactc

SEQ ID NO: 47220 - DNA, 25 bp, Homo Sapiens
cggtagagcatgagactcttaatct

SEQ ID NO: 47221 - DNA, 36 bp, Homo Sapiens; identical to SEQ ID NO: 12751

SEQ ID NO: 47222 - DNA, 39 bp, Homo Sapiens; identical to SEQ ID NO: 12753

SEQ ID NO: 47223 - DNA, 16 bp, Homo Sapiens
cggtagagcatgggac

SEQ ID NO: 47224 - DNA, 17 bp, Homo Sapiens
cggtagagcatgggact

SEQ ID NO: 47225 - DNA, 18 bp, Homo Sapiens
cggtagagcatgggactc

SEQ ID NO: 47226 - DNA, 24 bp, Homo Sapiens
cggtagagcatgggactcttaatc

SEQ ID NO: 47227 - DNA, 25 bp, Homo Sapiens
cggtagagcatgggactcttaatcc

SEQ ID NO: 47228 - DNA, 26 bp, Homo Sapiens
cggtagagcatgggactcttaatccc

SEQ ID NO: 47229 - DNA, 36 bp, Homo Sapiens; identical to SEQ ID NO: 12766

SEQ ID NO: 47230 - DNA, 39 bp, Homo Sapiens; identical to SEQ ID NO: 12767

SEQ ID NO: 47231 - DNA, 19 bp, Homo Sapiens
cggtagagcatttgactgc

SEQ ID NO: 47232 - DNA, 16 bp, Homo Sapiens
cggtagagcgcgtgct

SEQ ID NO: 47233 - DNA, 16 bp, Homo Sapiens
cggtagcgcgtctgac

SEQ ID NO: 47234 - DNA, 17 bp, Homo Sapiens
cggtagcgcgtctgact

SEQ ID NO: 47235 - DNA, 19 bp, Homo Sapiens
cggtagcgcgtctgactcc

SEQ ID NO: 47236 - DNA, 16 bp, Homo Sapiens
cggtctaaggcgctgc

SEQ ID NO: 47237 - DNA, 17 bp, Homo Sapiens
cggtctaaggcgctgcg

SEQ ID NO: 47238 - DNA, 19 bp, Homo Sapiens
cggtctaaggcgctgcgtt

SEQ ID NO: 47239 - DNA, 20 bp, Homo Sapiens
cggtctaaggcgctgcgttc

SEQ ID NO: 47240 - DNA, 17 bp, Homo Sapiens
cggtctaaggcgctgga

SEQ ID NO: 47241 - DNA, 27 bp, Homo Sapiens
cggtggccaagtggtaaggcgtcggtc

SEQ ID NO: 47242 - DNA, 24 bp, Homo Sapiens
cggttagcgcgttcggctgttaac

SEQ ID NO: 47243 - DNA, 17 bp, Homo Sapiens
cggttaggattcctggt

SEQ ID NO: 47244 - DNA, 18 bp, Homo Sapiens
cggttaggattcctggtt

SEQ ID NO: 47245 - DNA, 20 bp, Homo Sapiens
cggttaggattcctggtttt

SEQ ID NO: 47246 - DNA, 21 bp, Homo Sapiens
cggttaggattcctggttttc

SEQ ID NO: 47247 - DNA, 22 bp, Homo Sapiens
cggttaggattcctggttttca

SEQ ID NO: 47248 - DNA, 23 bp, Homo Sapiens
cggttaggattcctggttttcac

SEQ ID NO: 47249 - DNA, 24 bp, Homo Sapiens
cggttaggattcctggttttcacc

SEQ ID NO: 47250 - DNA, 27 bp, Homo Sapiens
cggttaggattcctggttttcacccag

SEQ ID NO: 47251 - DNA, 28 bp, Homo Sapiens
cggttaggattcctggttttcacccagg

SEQ ID NO: 47252 - DNA, 29 bp, Homo Sapiens
cggttaggattcctggttttcacccaggc

SEQ ID NO: 47253 - DNA, 16 bp, Homo Sapiens
cggttatcacgtctgc

SEQ ID NO: 47254 - DNA, 19 bp, Homo Sapiens
cggttcaaatccgggtgcc

SEQ ID NO: 47255 - DNA, 20 bp, Homo Sapiens
cggttcaaatccgggtgccc

SEQ ID NO: 47256 - DNA, 23 bp, Homo Sapiens
cggttcaaatccgggtgccccct

SEQ ID NO: 47257 - DNA, 16 bp, Homo Sapiens
cggttcgaaaccgggc

SEQ ID NO: 47258 - DNA, 23 bp, Homo Sapiens
cggttcgaaaccgggcggaaaca

SEQ ID NO: 47259 - DNA, 22 bp, Homo Sapiens
cggttcgaatccgagtcacggc

SEQ ID NO: 47260 - DNA, 23 bp, Homo Sapiens
cggttcgaatccgagtcacggca

SEQ ID NO: 47261 - DNA, 24 bp, Homo Sapiens
cggttcgaatccgagtcacggcac

SEQ ID NO: 47262 - DNA, 26 bp, Homo Sapiens
cggttcgaatccgagtcacggcacca

SEQ ID NO: 47263 - DNA, 38 bp, Homo Sapiens
cggtttgggtccgagaggtcccgggttcaaatcccgga

SEQ ID NO: 47264 - DNA, 16 bp, Homo Sapiens
cgtagtcgtggccgag

SEQ ID NO: 47265 - DNA, 17 bp, Homo Sapiens
cgtagtcgtggccgagt

SEQ ID NO: 47266 - DNA, 19 bp, Homo Sapiens
cgtagtcgtggccgagtgg

SEQ ID NO: 47267 - DNA, 18 bp, Homo Sapiens
cgtagtgtagtggtcatc

SEQ ID NO: 47268 - DNA, 28 bp, Homo Sapiens
cgtagtgtagtggtcatcacgttcgcct

SEQ ID NO: 47269 - DNA, 18 bp, Homo Sapiens
cgtagtgtagtggttatc

SEQ ID NO: 47270 - DNA, 27 bp, Homo Sapiens
cgtagtgtagtggttatcacgttcgcc

SEQ ID NO: 47271 - DNA, 28 bp, Homo Sapiens
cgtagtgtagtggttatcacgttcgcct

SEQ ID NO: 47272 - DNA, 47 bp, Homo Sapiens; identical to SEQ ID NO: 36059

SEQ ID NO: 47273 - DNA, 19 bp, Homo Sapiens
cgtatagtggttagtactc

SEQ ID NO: 47274 - DNA, 20 bp, Homo Sapiens
cgtatagtggttagtactct

SEQ ID NO: 47275 - DNA, 21 bp, Homo Sapiens
cgtatagtggttagtactctg

SEQ ID NO: 47276 - DNA, 22 bp, Homo Sapiens
cgtatagtggttagtactctgc

SEQ ID NO: 47277 - DNA, 23 bp, Homo Sapiens
cgtatagtggttagtactctgcg

SEQ ID NO: 47278 - DNA, 25 bp, Homo Sapiens
cgtatagtggttagtactctgcgtt

SEQ ID NO: 47279 - DNA, 31 bp, Homo Sapiens; identical to SEQ ID NO: 12890

SEQ ID NO: 47280 - DNA, 40 bp, Homo Sapiens; identical to SEQ ID NO: 12892

SEQ ID NO: 47281 - DNA, 41 bp, Homo Sapiens; identical to SEQ ID NO: 12893

SEQ ID NO: 47282 - DNA, 34 bp, Homo Sapiens; identical to SEQ ID NO: 12901

SEQ ID NO: 47283 - DNA, 38 bp, Homo Sapiens; identical to SEQ ID NO: 12904

SEQ ID NO: 47284 - DNA, 39 bp, Homo Sapiens
cgtatgaggccccgggttcaatccccggcatctccacca

SEQ ID NO: 47285 - DNA, 29 bp, Homo Sapiens
cgtgagttcgatcctcacacggggcacca

SEQ ID NO: 47286 - DNA, 22 bp, Homo Sapiens
cgtgatcgtatagtggttagta

SEQ ID NO: 47287 - DNA, 23 bp, Homo Sapiens
cgtgatcgtatagtggttagtac

SEQ ID NO: 47288 - DNA, 24 bp, Homo Sapiens
cgtgatcgtatagtggttagtact

SEQ ID NO: 47289 - DNA, 25 bp, Homo Sapiens
cgtgatcgtatagtggttagtactc

SEQ ID NO: 47290 - DNA, 26 bp, Homo Sapiens
cgtgatcgtatagtggttagtactct

SEQ ID NO: 47291 - DNA, 27 bp, Homo Sapiens
cgtgatcgtatagtggttagtactctg

SEQ ID NO: 47292 - DNA, 28 bp, Homo Sapiens
cgtgatcgtatagtggttagtactctgc

SEQ ID NO: 47293 - DNA, 29 bp, Homo Sapiens
cgtgatcgtatagtggttagtactctgcg

SEQ ID NO: 47294 - DNA, 30 bp, Homo Sapiens; identical to SEQ ID NO: 12928

SEQ ID NO: 47295 - DNA, 31 bp, Homo Sapiens; identical to SEQ ID NO: 12929

SEQ ID NO: 47296 - DNA, 32 bp, Homo Sapiens; identical to SEQ ID NO: 12930

SEQ ID NO: 47297 - DNA, 33 bp, Homo Sapiens; identical to SEQ ID NO: 12931

SEQ ID NO: 47298 - DNA, 34 bp, Homo Sapiens; identical to SEQ ID NO: 12932

SEQ ID NO: 47299 - DNA, 42 bp, Homo Sapiens; identical to SEQ ID NO: 12937

SEQ ID NO: 47300 - DNA, 18 bp, Homo Sapiens
cgtgctgggcccataacc

SEQ ID NO: 47301 - DNA, 19 bp, Homo Sapiens
cgtgctgggcccataaccc

SEQ ID NO: 47302 - DNA, 27 bp, Homo Sapiens
cgtgctgggcccataacccagaggtcg

SEQ ID NO: 47303 - DNA, 29 bp, Homo Sapiens
cgtgctgggcccataacccagaggtcgat

SEQ ID NO: 47304 - DNA, 30 bp, Homo Sapiens; identical to SEQ ID NO: 12946

SEQ ID NO: 47305 - DNA, 32 bp, Homo Sapiens; identical to SEQ ID NO: 12948

SEQ ID NO: 47306 - DNA, 33 bp, Homo Sapiens; identical to SEQ ID NO: 12949

SEQ ID NO: 47307 - DNA, 16 bp, Homo Sapiens
cgtggccgagcggtct

SEQ ID NO: 47308 - DNA, 17 bp, Homo Sapiens
cgtggccgagcggtcta

SEQ ID NO: 47309 - DNA, 28 bp, Homo Sapiens
cgtgggttcgaatcccaccttcgtcgcc

SEQ ID NO: 47310 - DNA, 25 bp, Homo Sapiens
cgtgggttcgaatcccacttctgac

SEQ ID NO: 47311 - DNA, 27 bp, Homo Sapiens
cgtgggttcgaatcccatcctcgtcgc

SEQ ID NO: 47312 - DNA, 28 bp, Homo Sapiens
cgtgggttcgaatcccatcctcgtcgcc

SEQ ID NO: 47313 - DNA, 29 bp, Homo Sapiens
cgtgggttcgaatcccatcctcgtcgcca

SEQ ID NO: 47314 - DNA, 25 bp, Homo Sapiens
cgtgggttcgagccccacgttgggc

SEQ ID NO: 47315 - DNA, 26 bp, Homo Sapiens
cgtgggttcgagccccacgttgggcg

SEQ ID NO: 47316 - DNA, 27 bp, Homo Sapiens
cgtgggttcgagccccacgttgggcgc

SEQ ID NO: 47317 - DNA, 28 bp, Homo Sapiens
cgtgggttcgagccccacgttgggcgcc

SEQ ID NO: 47318 - DNA, 29 bp, Homo Sapiens
cgtgggttcgagccccacgttgggcgcca

SEQ ID NO: 47319 - DNA, 19 bp, Homo Sapiens
cgtggttgtagtccgtgcg

SEQ ID NO: 47320 - DNA, 20 bp, Homo Sapiens
cgtggttgtagtccgtgcga

SEQ ID NO: 47321 - DNA, 22 bp, Homo Sapiens
cgtggttgtagtccgtgcgaga

SEQ ID NO: 47322 - DNA, 23 bp, Homo Sapiens
cgtggttgtagtccgtgcgagaa

SEQ ID NO: 47323 - DNA, 24 bp, Homo Sapiens
cgtggttgtagtccgtgcgagaat

SEQ ID NO: 47324 - DNA, 25 bp, Homo Sapiens
cgtggttgtagtccgtgcgagaata

SEQ ID NO: 47325 - DNA, 26 bp, Homo Sapiens
cgtggttgtagtccgtgcgagaatac

SEQ ID NO: 47326 - DNA, 27 bp, Homo Sapiens
cgtggttgtagtccgtgcgagaatacc

SEQ ID NO: 47327 - DNA, 28 bp, Homo Sapiens
cgtggttgtagtccgtgcgagaatacca

SEQ ID NO: 47328 - DNA, 26 bp, Homo Sapiens
cgtgttcaaatcacgtcggggtcacc

SEQ ID NO: 47329 - DNA, 26 bp, Homo Sapiens
cgtgttcaagtcacgtcggggtcacc

SEQ ID NO: 47330 - DNA, 24 bp, Homo Sapiens
cgtgttcgaatcacgtcggggtca

SEQ ID NO: 47331 - DNA, 25 bp, Homo Sapiens
cgtgttcgaatcacgtcggggtcac

SEQ ID NO: 47332 - DNA, 26 bp, Homo Sapiens
cgtgttcgaatcacgtcggggtcacc

SEQ ID NO: 47333 - DNA, 18 bp, Homo Sapiens
cgttcaggtcgcagtctc

SEQ ID NO: 47334 - DNA, 19 bp, Homo Sapiens
cgttcaggtcgcagtctcc

SEQ ID NO: 47335 - DNA, 20 bp, Homo Sapiens
cgttcaggtcgcagtctccc

SEQ ID NO: 47336 - DNA, 19 bp, Homo Sapiens
cgttcggctgttaaccgga

SEQ ID NO: 47337 - DNA, 27 bp, Homo Sapiens
cgttggtctaggggtatgattctcgct

SEQ ID NO: 47338 - DNA, 31 bp, Homo Sapiens; identical to SEQ ID NO: 13062

SEQ ID NO: 47339 - DNA, 31 bp, Homo Sapiens; identical to SEQ ID NO: 13069

SEQ ID NO: 47340 - DNA, 34 bp, Homo Sapiens; identical to SEQ ID NO: 13076

SEQ ID NO: 47341 - DNA, 34 bp, Homo Sapiens; identical to SEQ ID NO: 13078

SEQ ID NO: 47342 - DNA, 33 bp, Homo Sapiens; identical to SEQ ID NO: 13094

SEQ ID NO: 47343 - DNA, 34 bp, Homo Sapiens; identical to SEQ ID NO: 13095

SEQ ID NO: 47344 - DNA, 17 bp, Homo Sapiens
ctaaaggtccctggttc

SEQ ID NO: 47345 - DNA, 18 bp, Homo Sapiens
ctaaaggtccctggttcg

SEQ ID NO: 47346 - DNA, 33 bp, Homo Sapiens; identical to SEQ ID NO: 13099

SEQ ID NO: 47347 - DNA, 34 bp, Homo Sapiens; identical to SEQ ID NO: 13100

SEQ ID NO: 47348 - DNA, 35 bp, Homo Sapiens; identical to SEQ ID NO: 13101

SEQ ID NO: 47349 - DNA, 36 bp, Homo Sapiens; identical to SEQ ID NO: 13102

SEQ ID NO: 47350 - DNA, 37 bp, Homo Sapiens; identical to SEQ ID NO: 13103

SEQ ID NO: 47351 - DNA, 23 bp, Homo Sapiens
ctaacaacatggctttctcacca

SEQ ID NO: 47352 - DNA, 33 bp, Homo Sapiens; identical to SEQ ID NO: 13152

SEQ ID NO: 47353 - DNA, 41 bp, Homo Sapiens; identical to SEQ ID NO: 13160

SEQ ID NO: 47354 - DNA, 16 bp, Homo Sapiens
ctaagccagggattgt

SEQ ID NO: 47355 - DNA, 18 bp, Homo Sapiens
ctaagccagggattgtgg

SEQ ID NO: 47356 - DNA, 20 bp, Homo Sapiens
ctaagccagggattgtgggt

SEQ ID NO: 47357 - DNA, 22 bp, Homo Sapiens
ctaagccagggattgtgggttc

SEQ ID NO: 47358 - DNA, 23 bp, Homo Sapiens
ctaagccagggattgtgggttcg

SEQ ID NO: 47359 - DNA, 41 bp, Homo Sapiens; identical to SEQ ID NO: 13181

SEQ ID NO: 47360 - DNA, 32 bp, Homo Sapiens; identical to SEQ ID NO: 13184

SEQ ID NO: 47361 - DNA, 41 bp, Homo Sapiens; identical to SEQ ID NO: 13186

SEQ ID NO: 47362 - DNA, 42 bp, Homo Sapiens; identical to SEQ ID NO: 13187

SEQ ID NO: 47363 - DNA, 16 bp, Homo Sapiens
ctaatggataaggcac

SEQ ID NO: 47364 - DNA, 17 bp, Homo Sapiens
ctaatggataaggcact

SEQ ID NO: 47365 - DNA, 18 bp, Homo Sapiens
ctaatggataaggcactg

SEQ ID NO: 47366 - DNA, 17 bp, Homo Sapiens
ctaatggataaggcatc

SEQ ID NO: 47367 - DNA, 20 bp, Homo Sapiens
ctaatggataaggcatcagc

SEQ ID NO: 47368 - DNA, 22 bp, Homo Sapiens
ctaatggataaggcatcagcct

SEQ ID NO: 47369 - DNA, 24 bp, Homo Sapiens
ctaatggataaggcatcagcctcc

SEQ ID NO: 47370 - DNA, 31 bp, Homo Sapiens; identical to SEQ ID NO: 13229

SEQ ID NO: 47371 - DNA, 18 bp, Homo Sapiens
ctaatggataaggcattg

SEQ ID NO: 47372 - DNA, 22 bp, Homo Sapiens
ctaatggataaggcattggcct

SEQ ID NO: 47373 - DNA, 30 bp, Homo Sapiens
ctaatggataaggcattggcctcctaagcc

SEQ ID NO: 47374 - DNA, 20 bp, Homo Sapiens
ctaatggataaggcgtctga

SEQ ID NO: 47375 - DNA, 33 bp, Homo Sapiens; identical to SEQ ID NO: 13256

SEQ ID NO: 47376 - DNA, 34 bp, Homo Sapiens; identical to SEQ ID NO: 13257

SEQ ID NO: 47377 - DNA, 20 bp, Homo Sapiens
ctaattcaaaggttccgggt

SEQ ID NO: 47378 - DNA, 41 bp, Homo Sapiens; identical to SEQ ID NO: 13261

SEQ ID NO: 47379 - DNA, 41 bp, Homo Sapiens; identical to SEQ ID NO: 13263

SEQ ID NO: 47380 - DNA, 41 bp, Homo Sapiens; identical to SEQ ID NO: 13265

SEQ ID NO: 47381 - DNA, 16 bp, Homo Sapiens
ctagcggttaggattc

SEQ ID NO: 47382 - DNA, 17 bp, Homo Sapiens
ctagcggttaggattcc

SEQ ID NO: 47383 - DNA, 19 bp, Homo Sapiens
ctagcggttaggattcctg

SEQ ID NO: 47384 - DNA, 20 bp, Homo Sapiens
ctagcggttaggattcctgg

SEQ ID NO: 47385 - DNA, 21 bp, Homo Sapiens
ctagcggttaggattcctggt

SEQ ID NO: 47386 - DNA, 22 bp, Homo Sapiens
ctagcggttaggattcctggtt

SEQ ID NO: 47387 - DNA, 31 bp, Homo Sapiens; identical to SEQ ID NO: 36198

SEQ ID NO: 47388 - DNA, 17 bp, Homo Sapiens
ctagctcagtcggtaga

SEQ ID NO: 47389 - DNA, 18 bp, Homo Sapiens
ctagctcagtcggtagag

SEQ ID NO: 47390 - DNA, 26 bp, Homo Sapiens
ctagctcagtcggtagagcatgagac

SEQ ID NO: 47391 - DNA, 27 bp, Homo Sapiens
ctagctcagtcggtagagcatgagact

SEQ ID NO: 47392 - DNA, 29 bp, Homo Sapiens
ctagctcagtcggtagagcatgagactct

SEQ ID NO: 47393 - DNA, 26 bp, Homo Sapiens
ctagctcagtcggtagagcatgggac

SEQ ID NO: 47394 - DNA, 27 bp, Homo Sapiens
ctagctcagtcggtagagcatgggact

SEQ ID NO: 47395 - DNA, 28 bp, Homo Sapiens
ctagctcagtcggtagagcatgggactc

SEQ ID NO: 47396 - DNA, 43 bp, Homo Sapiens; identical to SEQ ID NO: 13305

SEQ ID NO: 47397 - DNA, 31 bp, Homo Sapiens; identical to SEQ ID NO: 13310

SEQ ID NO: 47398 - DNA, 32 bp, Homo Sapiens; identical to SEQ ID NO: 13311

SEQ ID NO: 47399 - DNA, 33 bp, Homo Sapiens; identical to SEQ ID NO: 13312

SEQ ID NO: 47400 - DNA, 34 bp, Homo Sapiens; identical to SEQ ID NO: 13313

SEQ ID NO: 47401 - DNA, 37 bp, Homo Sapiens; identical to SEQ ID NO: 13316

SEQ ID NO: 47402 - DNA, 17 bp, Homo Sapiens
ctaggggtatgattctc

SEQ ID NO: 47403 - DNA, 20 bp, Homo Sapiens
ctaggggtatgattctcgct

SEQ ID NO: 47404 - DNA, 21 bp, Homo Sapiens
ctaggggtatgattctcgctt

SEQ ID NO: 47405 - DNA, 21 bp, Homo Sapiens
ctaggggtatgattctcggtt

SEQ ID NO: 47406 - DNA, 27 bp, Homo Sapiens
ctaggttcgactcctggctggctcgcc

SEQ ID NO: 47407 - DNA, 19 bp, Homo Sapiens
ctagtggtatgattctcgc

SEQ ID NO: 47408 - DNA, 20 bp, Homo Sapiens
ctagtggtatgattctcgct

SEQ ID NO: 47409 - DNA, 18 bp, Homo Sapiens
ctagtggttaggattcgg

SEQ ID NO: 47410 - DNA, 19 bp, Homo Sapiens
ctagtggttaggattcggc

SEQ ID NO: 47411 - DNA, 20 bp, Homo Sapiens
ctagtggttaggattcggcg

SEQ ID NO: 47412 - DNA, 21 bp, Homo Sapiens
ctagtggttaggattcggcgc

SEQ ID NO: 47413 - DNA, 22 bp, Homo Sapiens
ctagtggttaggattcggcgct

SEQ ID NO: 47414 - DNA, 23 bp, Homo Sapiens
ctagtggttaggattcggcgctc

SEQ ID NO: 47415 - DNA, 24 bp, Homo Sapiens
ctagtggttaggattcggcgctct

SEQ ID NO: 47416 - DNA, 31 bp, Homo Sapiens; identical to SEQ ID NO: 13363

SEQ ID NO: 47417 - DNA, 38 bp, Homo Sapiens; identical to SEQ ID NO: 13365

SEQ ID NO: 47418 - DNA, 16 bp, Homo Sapiens
ctatcgggcccatacc

SEQ ID NO: 47419 - DNA, 42 bp, Homo Sapiens; identical to SEQ ID NO: 13423

SEQ ID NO: 47420 - DNA, 16 bp, Homo Sapiens
ctcaagttctggtctc

SEQ ID NO: 47421 - DNA, 17 bp, Homo Sapiens
ctcaagttctggtctcc

SEQ ID NO: 47422 - DNA, 31 bp, Homo Sapiens; identical to SEQ ID NO: 13463

SEQ ID NO: 47423 - DNA, 44 bp, Homo Sapiens; identical to SEQ ID NO: 13476

SEQ ID NO: 47424 - DNA, 46 bp, Homo Sapiens; identical to SEQ ID NO: 13478

SEQ ID NO: 47425 - DNA, 22 bp, Homo Sapiens
ctcacacgcgaaaggtccccgg

SEQ ID NO: 47426 - DNA, 23 bp, Homo Sapiens
ctcacacgcgaaaggtccccggt

SEQ ID NO: 47427 - DNA, 16 bp, Homo Sapiens
ctcacacggggcacca

SEQ ID NO: 47428 - DNA, 16 bp, Homo Sapiens
ctcaccgccgcggccc

SEQ ID NO: 47429 - DNA, 21 bp, Homo Sapiens
ctcaccgccgcggcccgggtt

SEQ ID NO: 47430 - DNA, 23 bp, Homo Sapiens
ctcaccgccgcggcccgggttcg

SEQ ID NO: 47431 - DNA, 39 bp, Homo Sapiens; identical to SEQ ID NO: 13508

SEQ ID NO: 47432 - DNA, 40 bp, Homo Sapiens; identical to SEQ ID NO: 13509

SEQ ID NO: 47433 - DNA, 41 bp, Homo Sapiens; identical to SEQ ID NO: 13510

SEQ ID NO: 47434 - DNA, 42 bp, Homo Sapiens; identical to SEQ ID NO: 13511

SEQ ID NO: 47435 - DNA, 16 bp, Homo Sapiens
ctcacctggagcacca

SEQ ID NO: 47436 - DNA, 16 bp, Homo Sapiens
ctcagagggggcacca

SEQ ID NO: 47437 - DNA, 29 bp, Homo Sapiens
ctcagggatgggttcgattctcatagtcc

SEQ ID NO: 47438 - DNA, 30 bp, Homo Sapiens; identical to SEQ ID NO: 13523

SEQ ID NO: 47439 - DNA, 32 bp, Homo Sapiens; identical to SEQ ID NO: 13524

SEQ ID NO: 47440 - DNA, 33 bp, Homo Sapiens; identical to SEQ ID NO: 13525

SEQ ID NO: 47441 - DNA, 34 bp, Homo Sapiens; identical to SEQ ID NO: 13526

SEQ ID NO: 47442 - DNA, 34 bp, Homo Sapiens; identical to SEQ ID NO: 13539

SEQ ID NO: 47443 - DNA, 36 bp, Homo Sapiens; identical to SEQ ID NO: 13541

SEQ ID NO: 47444 - DNA, 37 bp, Homo Sapiens; identical to SEQ ID NO: 13542

SEQ ID NO: 47445 - DNA, 28 bp, Homo Sapiens
ctcagtaagttgcaatacttaatttctg

SEQ ID NO: 47446 - DNA, 30 bp, Homo Sapiens; identical to SEQ ID NO: 13557

SEQ ID NO: 47447 - DNA, 31 bp, Homo Sapiens; identical to SEQ ID NO: 13558

SEQ ID NO: 47448 - DNA, 16 bp, Homo Sapiens
ctcagtcggtagagca

SEQ ID NO: 47449 - DNA, 17 bp, Homo Sapiens
ctcagtcggtagagcat

SEQ ID NO: 47450 - DNA, 18 bp, Homo Sapiens
ctcagtcggtagagcatc

SEQ ID NO: 47451 - DNA, 21 bp, Homo Sapiens
ctcagtcggtagagcatcaga

SEQ ID NO: 47452 - DNA, 22 bp, Homo Sapiens
ctcagtcggtagagcatcagac

SEQ ID NO: 47453 - DNA, 23 bp, Homo Sapiens
ctcagtcggtagagcatcagact

SEQ ID NO: 47454 - DNA, 26 bp, Homo Sapiens
ctcagtcggtagagcatcagactttt

SEQ ID NO: 47455 - DNA, 23 bp, Homo Sapiens
ctcagtcggtagagcatgagact

SEQ ID NO: 47456 - DNA, 25 bp, Homo Sapiens
ctcagtcggtagagcatgagactct

SEQ ID NO: 47457 - DNA, 20 bp, Homo Sapiens
ctcagtcggtagagcatggg

SEQ ID NO: 47458 - DNA, 22 bp, Homo Sapiens
ctcagtcggtagagcatgggac

SEQ ID NO: 47459 - DNA, 23 bp, Homo Sapiens
ctcagtcggtagagcatgggact

SEQ ID NO: 47460 - DNA, 24 bp, Homo Sapiens
ctcagtcggtagagcatgggactc

SEQ ID NO: 47461 - DNA, 25 bp, Homo Sapiens
ctcagtcggtagagcatgggactct

SEQ ID NO: 47462 - DNA, 26 bp, Homo Sapiens
ctcagtcggtagagcatgggactctt

SEQ ID NO: 47463 - DNA, 31 bp, Homo Sapiens; identical to SEQ ID NO: 13601

SEQ ID NO: 47464 - DNA, 32 bp, Homo Sapiens; identical to SEQ ID NO: 13602

SEQ ID NO: 47465 - DNA, 23 bp, Homo Sapiens
ctcataatctgaaggtcctgagt

SEQ ID NO: 47466 - DNA, 44 bp, Homo Sapiens; identical to SEQ ID NO: 13624

SEQ ID NO: 47467 - DNA, 45 bp, Homo Sapiens; identical to SEQ ID NO: 13625

SEQ ID NO: 47468 - DNA, 23 bp, Homo Sapiens
ctcataatctgaaggtcgtgagt

SEQ ID NO: 47469 - DNA, 44 bp, Homo Sapiens; identical to SEQ ID NO: 13630

SEQ ID NO: 47470 - DNA, 45 bp, Homo Sapiens
ctcataatctgaaggtcgtgagttcgatcctcacacggggcacca

SEQ ID NO: 47471 - DNA, 29 bp, Homo Sapiens
ctcatgcccccatgtctaacaacatggct

SEQ ID NO: 47472 - DNA, 35 bp, Homo Sapiens; identical to SEQ ID NO: 13650

SEQ ID NO: 47473 - DNA, 37 bp, Homo Sapiens; identical to SEQ ID NO: 13652

SEQ ID NO: 47474 - DNA, 38 bp, Homo Sapiens; identical to SEQ ID NO: 36299

SEQ ID NO: 47475 - DNA, 17 bp, Homo Sapiens
ctccagatcagaaggct

SEQ ID NO: 47476 - DNA, 25 bp, Homo Sapiens
ctccagatcagaaggctgcgtgttc

SEQ ID NO: 47477 - DNA, 46 bp, Homo Sapiens; identical to SEQ ID NO: 13677

SEQ ID NO: 47478 - DNA, 46 bp, Homo Sapiens; identical to SEQ ID NO: 13681

SEQ ID NO: 47479 - DNA, 44 bp, Homo Sapiens; identical to SEQ ID NO: 13687

SEQ ID NO: 47480 - DNA, 46 bp, Homo Sapiens; identical to SEQ ID NO: 13689

SEQ ID NO: 47481 - DNA, 16 bp, Homo Sapiens
ctcccggtatgggaac

SEQ ID NO: 47482 - DNA, 17 bp, Homo Sapiens
ctcccggtatgggaacc

SEQ ID NO: 47483 - DNA, 16 bp, Homo Sapiens
ctcccggtgtgggaac

SEQ ID NO: 47484 - DNA, 17 bp, Homo Sapiens
ctcccggtgtgggaacc

SEQ ID NO: 47485 - DNA, 18 bp, Homo Sapiens
ctcccggtgtgggaacca

SEQ ID NO: 47486 - DNA, 32 bp, Homo Sapiens; identical to SEQ ID NO: 13725

SEQ ID NO: 47487 - DNA, 33 bp, Homo Sapiens; identical to SEQ ID NO: 13726

SEQ ID NO: 47488 - DNA, 34 bp, Homo Sapiens; identical to SEQ ID NO: 13727

SEQ ID NO: 47489 - DNA, 35 bp, Homo Sapiens; identical to SEQ ID NO: 13728

SEQ ID NO: 47490 - DNA, 36 bp, Homo Sapiens; identical to SEQ ID NO: 13729

SEQ ID NO: 47491 - DNA, 29 bp, Homo Sapiens
ctccgaggtgattttcatattgaattgca

SEQ ID NO: 47492 - DNA, 41 bp, Homo Sapiens; identical to SEQ ID NO: 36336

SEQ ID NO: 47493 - DNA, 34 bp, Homo Sapiens; identical to SEQ ID NO: 13790

SEQ ID NO: 47494 - DNA, 16 bp, Homo Sapiens
ctcctggctggctcgc

SEQ ID NO: 47495 - DNA, 17 bp, Homo Sapiens
ctcctggctggctcgcc

SEQ ID NO: 47496 - DNA, 18 bp, Homo Sapiens
ctcctggctggctcgcca

SEQ ID NO: 47497 - DNA, 16 bp, Homo Sapiens
ctcgctggggcctcca

SEQ ID NO: 47498 - DNA, 16 bp, Homo Sapiens
ctcggtggaacctcca

SEQ ID NO: 47499 - DNA, 16 bp, Homo Sapiens
ctcggtgggacctcca

SEQ ID NO: 47500 - DNA, 26 bp, Homo Sapiens
ctcggttcgaatccgagtcacggcac

SEQ ID NO: 47501 - DNA, 18 bp, Homo Sapiens
ctctcaccgccgcggccc

SEQ ID NO: 47502 - DNA, 41 bp, Homo Sapiens; identical to SEQ ID NO: 13880

SEQ ID NO: 47503 - DNA, 42 bp, Homo Sapiens; identical to SEQ ID NO: 13881

SEQ ID NO: 47504 - DNA, 44 bp, Homo Sapiens; identical to SEQ ID NO: 13883

SEQ ID NO: 47505 - DNA, 18 bp, Homo Sapiens
ctctgaatccagcgatcc

SEQ ID NO: 47506 - DNA, 19 bp, Homo Sapiens
ctctgaatccagcgatccg

SEQ ID NO: 47507 - DNA, 20 bp, Homo Sapiens
ctctgaatccagcgatccga

SEQ ID NO: 47508 - DNA, 21 bp, Homo Sapiens
ctctgaatccagcgatccgag

SEQ ID NO: 47509 - DNA, 22 bp, Homo Sapiens
ctctgaatccagcgatccgagt

SEQ ID NO: 47510 - DNA, 23 bp, Homo Sapiens
ctctgaatccagcgatccgagtt

SEQ ID NO: 47511 - DNA, 41 bp, Homo Sapiens; identical to SEQ ID NO: 13897

SEQ ID NO: 47512 - DNA, 42 bp, Homo Sapiens; identical to SEQ ID NO: 36359

SEQ ID NO: 47513 - DNA, 44 bp, Homo Sapiens
ctctgaatccagcgatccgagttcaaatctcggtggaacctcca

SEQ ID NO: 47514 - DNA, 16 bp, Homo Sapiens
ctctgcgttgtggccg

SEQ ID NO: 47515 - DNA, 17 bp, Homo Sapiens
ctctgcgttgtggccgc

SEQ ID NO: 47516 - DNA, 16 bp, Homo Sapiens
ctctggactctgaatc

SEQ ID NO: 47517 - DNA, 17 bp, Homo Sapiens
ctctggactctgaatcc

SEQ ID NO: 47518 - DNA, 18 bp, Homo Sapiens
ctctggactctgaatcca

SEQ ID NO: 47519 - DNA, 19 bp, Homo Sapiens
ctctggactctgaatccag

SEQ ID NO: 47520 - DNA, 20 bp, Homo Sapiens
ctctggactctgaatccagc

SEQ ID NO: 47521 - DNA, 21 bp, Homo Sapiens
ctctggactctgaatccagcg

SEQ ID NO: 47522 - DNA, 23 bp, Homo Sapiens
ctctggactctgaatccagcgat

SEQ ID NO: 47523 - DNA, 27 bp, Homo Sapiens
ctctggactctgaatccagcgatccga

SEQ ID NO: 47524 - DNA, 28 bp, Homo Sapiens
ctctggactctgaatccagcgatccgag

SEQ ID NO: 47525 - DNA, 29 bp, Homo Sapiens
ctctggactctgaatccagcgatccgagt

SEQ ID NO: 47526 - DNA, 30 bp, Homo Sapiens; identical to SEQ ID NO: 13916

SEQ ID NO: 47527 - DNA, 31 bp, Homo Sapiens; identical to SEQ ID NO: 13917

SEQ ID NO: 47528 - DNA, 32 bp, Homo Sapiens; identical to SEQ ID NO: 13918

SEQ ID NO: 47529 - DNA, 16 bp, Homo Sapiens
ctctggactttgaatc

SEQ ID NO: 47530 - DNA, 17 bp, Homo Sapiens
ctctggactttgaatcc

SEQ ID NO: 47531 - DNA, 16 bp, Homo Sapiens
ctctgtggaacctcca

SEQ ID NO: 47532 - DNA, 18 bp, Homo Sapiens
ctcttaatcccagggtcg

SEQ ID NO: 47533 - DNA, 19 bp, Homo Sapiens
ctcttaatcccagggtcgt

SEQ ID NO: 47534 - DNA, 18 bp, Homo Sapiens
ctcttcgggggcgtgggt

SEQ ID NO: 47535 - DNA, 16 bp, Homo Sapiens
ctctttacagtgacca

SEQ ID NO: 47536 - DNA, 20 bp, Homo Sapiens
ctgaaaatgtttagacgggc

SEQ ID NO: 47537 - DNA, 21 bp, Homo Sapiens
ctgaaaatgtttagacgggct

SEQ ID NO: 47538 - DNA, 30 bp, Homo Sapiens; identical to SEQ ID NO: 13960

SEQ ID NO: 47539 - DNA, 16 bp, Homo Sapiens
ctgaaggtcctgagtt

SEQ ID NO: 47540 - DNA, 17 bp, Homo Sapiens
ctgaaggtcctgagttc

SEQ ID NO: 47541 - DNA, 18 bp, Homo Sapiens
ctgaaggtcctgagttcg

SEQ ID NO: 47542 - DNA, 21 bp, Homo Sapiens
ctgaaggtcctgagttcgaac

SEQ ID NO: 47543 - DNA, 34 bp, Homo Sapiens; identical to SEQ ID NO: 13983

SEQ ID NO: 47544 - DNA, 35 bp, Homo Sapiens; identical to SEQ ID NO: 13984

SEQ ID NO: 47545 - DNA, 36 bp, Homo Sapiens; identical to SEQ ID NO: 13985

SEQ ID NO: 47546 - DNA, 37 bp, Homo Sapiens; identical to SEQ ID NO: 13986

SEQ ID NO: 47547 - DNA, 16 bp, Homo Sapiens
ctgaaggtcgtgagtt

SEQ ID NO: 47548 - DNA, 17 bp, Homo Sapiens
ctgaaggtcgtgagttc

SEQ ID NO: 47549 - DNA, 18 bp, Homo Sapiens
ctgaaggtcgtgagttcg

SEQ ID NO: 47550 - DNA, 31 bp, Homo Sapiens; identical to SEQ ID NO: 14000

SEQ ID NO: 47551 - DNA, 34 bp, Homo Sapiens; identical to SEQ ID NO: 14002

SEQ ID NO: 47552 - DNA, 35 bp, Homo Sapiens; identical to SEQ ID NO: 14003

SEQ ID NO: 47553 - DNA, 36 bp, Homo Sapiens; identical to SEQ ID NO: 14004

SEQ ID NO: 47554 - DNA, 37 bp, Homo Sapiens; identical to SEQ ID NO: 14005

SEQ ID NO: 47555 - DNA, 35 bp, Homo Sapiens; identical to SEQ ID NO: 14009

SEQ ID NO: 47556 - DNA, 36 bp, Homo Sapiens; identical to SEQ ID NO: 14010

SEQ ID NO: 47557 - DNA, 37 bp, Homo Sapiens; identical to SEQ ID NO: 14011

SEQ ID NO: 47558 - DNA, 16 bp, Homo Sapiens
ctgaatccagcgatcc

SEQ ID NO: 47559 - DNA, 17 bp, Homo Sapiens
ctgaatccagcgatccg

SEQ ID NO: 47560 - DNA, 18 bp, Homo Sapiens
ctgaatccagcgatccga

SEQ ID NO: 47561 - DNA, 19 bp, Homo Sapiens
ctgaatccagcgatccgag

SEQ ID NO: 47562 - DNA, 20 bp, Homo Sapiens
ctgaatccagcgatccgagt

SEQ ID NO: 47563 - DNA, 21 bp, Homo Sapiens
ctgaatccagcgatccgagtt

SEQ ID NO: 47564 - DNA, 22 bp, Homo Sapiens
ctgaatccagcgatccgagttc

SEQ ID NO: 47565 - DNA, 23 bp, Homo Sapiens
ctgaatccagcgatccgagttca

SEQ ID NO: 47566 - DNA, 40 bp, Homo Sapiens; identical to SEQ ID NO: 14032

SEQ ID NO: 47567 - DNA, 16 bp, Homo Sapiens
ctgacaacagaggctt

SEQ ID NO: 47568 - DNA, 24 bp, Homo Sapiens
ctgacaacagaggcttacgacccc

SEQ ID NO: 47569 - DNA, 33 bp, Homo Sapiens; identical to SEQ ID NO: 14063

SEQ ID NO: 47570 - DNA, 34 bp, Homo Sapiens; identical to SEQ ID NO: 14064

SEQ ID NO: 47571 - DNA, 35 bp, Homo Sapiens; identical to SEQ ID NO: 14065

SEQ ID NO: 47572 - DNA, 36 bp, Homo Sapiens; identical to SEQ ID NO: 14066

SEQ ID NO: 47573 - DNA, 23 bp, Homo Sapiens
ctgactccagatcagaaggctgc

SEQ ID NO: 47574 - DNA, 29 bp, Homo Sapiens
ctgactccagatcagaaggctgcgtgttc

SEQ ID NO: 47575 - DNA, 17 bp, Homo Sapiens
ctgagggtccagggttc

SEQ ID NO: 47576 - DNA, 33 bp, Homo Sapiens; identical to SEQ ID NO: 14079

SEQ ID NO: 47577 - DNA, 34 bp, Homo Sapiens; identical to SEQ ID NO: 14080

SEQ ID NO: 47578 - DNA, 35 bp, Homo Sapiens; identical to SEQ ID NO: 14081

SEQ ID NO: 47579 - DNA, 36 bp, Homo Sapiens; identical to SEQ ID NO: 14082

SEQ ID NO: 47580 - DNA, 37 bp, Homo Sapiens; identical to SEQ ID NO: 14083

SEQ ID NO: 47581 - DNA, 26 bp, Homo Sapiens
ctgagggtccagggttcatgtccctg

SEQ ID NO: 47582 - DNA, 23 bp, Homo Sapiens
ctgcagatcaagaggtccccggt

SEQ ID NO: 47583 - DNA, 18 bp, Homo Sapiens
ctgccacgcgggaggccc

SEQ ID NO: 47584 - DNA, 19 bp, Homo Sapiens
ctgccacgcgggaggcccg

SEQ ID NO: 47585 - DNA, 21 bp, Homo Sapiens
ctgccacgcgggaggcccggg

SEQ ID NO: 47586 - DNA, 22 bp, Homo Sapiens
ctgccacgcgggaggcccgggt

SEQ ID NO: 47587 - DNA, 44 bp, Homo Sapiens
ctgccacgcgggaggcccgggttcgattcccggccaatgcacca

SEQ ID NO: 47588 - DNA, 24 bp, Homo Sapiens
ctgcgtgttcgaatcacgtcgggg

SEQ ID NO: 47589 - DNA, 26 bp, Homo Sapiens
ctgcgtgttcgaatcacgtcggggtc

SEQ ID NO: 47590 - DNA, 27 bp, Homo Sapiens
ctgcgtgttcgaatcacgtcggggtca

SEQ ID NO: 47591 - DNA, 29 bp, Homo Sapiens
ctgcgtgttcgaatcacgtcggggtcacc

SEQ ID NO: 47592 - DNA, 30 bp, Homo Sapiens; identical to SEQ ID NO: 14130

SEQ ID NO: 47593 - DNA, 18 bp, Homo Sapiens
ctgctaactcatgccccc

SEQ ID NO: 47594 - DNA, 36 bp, Homo Sapiens; identical to SEQ ID NO: 14151

SEQ ID NO: 47595 - DNA, 42 bp, Homo Sapiens; identical to SEQ ID NO: 14157

SEQ ID NO: 47596 - DNA, 44 bp, Homo Sapiens; identical to SEQ ID NO: 14159

SEQ ID NO: 47597 - DNA, 45 bp, Homo Sapiens; identical to SEQ ID NO: 14160

SEQ ID NO: 47598 - DNA, 18 bp, Homo Sapiens
ctgctaatccattgtgct

SEQ ID NO: 47599 - DNA, 16 bp, Homo Sapiens
ctggactctgaatcca

SEQ ID NO: 47600 - DNA, 18 bp, Homo Sapiens
ctggactctgaatccagc

SEQ ID NO: 47601 - DNA, 19 bp, Homo Sapiens
ctggactctgaatccagcg

SEQ ID NO: 47602 - DNA, 21 bp, Homo Sapiens
ctggactctgaatccagcgat

SEQ ID NO: 47603 - DNA, 23 bp, Homo Sapiens
ctggactctgaatccagcgatcc

SEQ ID NO: 47604 - DNA, 26 bp, Homo Sapiens
ctggactctgaatccagcgatccgag

SEQ ID NO: 47605 - DNA, 27 bp, Homo Sapiens
ctggactctgaatccagcgatccgagt

SEQ ID NO: 47606 - DNA, 28 bp, Homo Sapiens
ctggactctgaatccagcgatccgagtt

SEQ ID NO: 47607 - DNA, 29 bp, Homo Sapiens
ctggactctgaatccagcgatccgagttc

SEQ ID NO: 47608 - DNA, 39 bp, Homo Sapiens; identical to SEQ ID NO: 14182

SEQ ID NO: 47609 - DNA, 46 bp, Homo Sapiens; identical to SEQ ID NO: 14184

SEQ ID NO: 47610 - DNA, 35 bp, Homo Sapiens; identical to SEQ ID NO: 14192

SEQ ID NO: 47611 - DNA, 16 bp, Homo Sapiens
ctggggattgtgggtt

SEQ ID NO: 47612 - DNA, 24 bp, Homo Sapiens
ctggggattgtgggttcgagtccc

SEQ ID NO: 47613 - DNA, 27 bp, Homo Sapiens
ctggggattgtgggttcgagtcccatc

SEQ ID NO: 47614 - DNA, 34 bp, Homo Sapiens; identical to SEQ ID NO: 14221

SEQ ID NO: 47615 - DNA, 35 bp, Homo Sapiens; identical to SEQ ID NO: 14222

SEQ ID NO: 47616 - DNA, 36 bp, Homo Sapiens; identical to SEQ ID NO: 14223

SEQ ID NO: 47617 - DNA, 37 bp, Homo Sapiens; identical to SEQ ID NO: 14224

SEQ ID NO: 47618 - DNA, 26 bp, Homo Sapiens
ctgggttcgaatcccagcggtgcctc

SEQ ID NO: 47619 - DNA, 27 bp, Homo Sapiens
ctgggttcgagccccagtggaaccacc

SEQ ID NO: 47620 - DNA, 43 bp, Homo Sapiens; identical to SEQ ID NO: 36499

SEQ ID NO: 47621 - DNA, 45 bp, Homo Sapiens; identical to SEQ ID NO: 14245

SEQ ID NO: 47622 - DNA, 44 bp, Homo Sapiens; identical to SEQ ID NO: 36502

SEQ ID NO: 47623 - DNA, 46 bp, Homo Sapiens; identical to SEQ ID NO: 14247

SEQ ID NO: 47624 - DNA, 33 bp, Homo Sapiens; identical to SEQ ID NO: 14261

SEQ ID NO: 47625 - DNA, 22 bp, Homo Sapiens
ctggtggtctagtggttaggat

SEQ ID NO: 47626 - DNA, 25 bp, Homo Sapiens
ctggtggtctagtggttaggattcg

SEQ ID NO: 47627 - DNA, 27 bp, Homo Sapiens
ctggtggtctagtggttaggattcggc

SEQ ID NO: 47628 - DNA, 28 bp, Homo Sapiens
ctggtggtctagtggttaggattcggcg

SEQ ID NO: 47629 - DNA, 29 bp, Homo Sapiens
ctggtggtctagtggttaggattcggcgc

SEQ ID NO: 47630 - DNA, 30 bp, Homo Sapiens; identical to SEQ ID NO: 14277

SEQ ID NO: 47631 - DNA, 31 bp, Homo Sapiens; identical to SEQ ID NO: 14278

SEQ ID NO: 47632 - DNA, 32 bp, Homo Sapiens; identical to SEQ ID NO: 14279

SEQ ID NO: 47633 - DNA, 33 bp, Homo Sapiens; identical to SEQ ID NO: 14280

SEQ ID NO: 47634 - DNA, 39 bp, Homo Sapiens; identical to SEQ ID NO: 14284

SEQ ID NO: 47635 - DNA, 19 bp, Homo Sapiens
ctggtgtagtggtatcatg

SEQ ID NO: 47636 - DNA, 23 bp, Homo Sapiens
ctggtgtagtggtatcatgcaag

SEQ ID NO: 47637 - DNA, 24 bp, Homo Sapiens
ctggtgtagtggtatcatgcaaga

SEQ ID NO: 47638 - DNA, 26 bp, Homo Sapiens
ctggtgtagtggtatcatgcaagatt

SEQ ID NO: 47639 - DNA, 46 bp, Homo Sapiens; identical to SEQ ID NO: 14304

SEQ ID NO: 47640 - DNA, 23 bp, Homo Sapiens
ctggttcaaatccgggtgccccc

SEQ ID NO: 47641 - DNA, 25 bp, Homo Sapiens
ctggttcgaatccggctcgaaggac

SEQ ID NO: 47642 - DNA, 26 bp, Homo Sapiens
ctggttcgaatccggctcgaaggacc

SEQ ID NO: 47643 - DNA, 25 bp, Homo Sapiens
ctggttcgaatccggctcggaggac

SEQ ID NO: 47644 - DNA, 24 bp, Homo Sapiens
ctggttcgatcccgggtttcggca

SEQ ID NO: 47645 - DNA, 25 bp, Homo Sapiens
ctggttcgatcccgggtttcggcac

SEQ ID NO: 47646 - DNA, 26 bp, Homo Sapiens
ctggttcgatcccgggtttcggcacc

SEQ ID NO: 47647 - DNA, 27 bp, Homo Sapiens
ctggttcgatcccgggtttcggcacca

SEQ ID NO: 47648 - DNA, 25 bp, Homo Sapiens
ctggttcgattccggctcgaaggac

SEQ ID NO: 47649 - DNA, 26 bp, Homo Sapiens
ctggttcgattccggctcgaaggacc

SEQ ID NO: 47650 - DNA, 27 bp, Homo Sapiens
ctggttcgattccggctcgaaggacca

SEQ ID NO: 47651 - DNA, 23 bp, Homo Sapiens
ctggttttcacccaggcggcccg

SEQ ID NO: 47652 - DNA, 45 bp, Homo Sapiens; identical to SEQ ID NO: 36541

SEQ ID NO: 47653 - DNA, 46 bp, Homo Sapiens; identical to SEQ ID NO: 36542

SEQ ID NO: 47654 - DNA, 47 bp, Homo Sapiens; identical to SEQ ID NO: 14328

SEQ ID NO: 47655 - DNA, 19 bp, Homo Sapiens
ctgtagatccttaggtcgc

SEQ ID NO: 47656 - DNA, 23 bp, Homo Sapiens
ctgtagatccttaggtcgctggt

SEQ ID NO: 47657 - DNA, 16 bp, Homo Sapiens
ctgtcacgcgggagac

SEQ ID NO: 47658 - DNA, 17 bp, Homo Sapiens
ctgtcacgcgggagacc

SEQ ID NO: 47659 - DNA, 18 bp, Homo Sapiens
ctgtcacgcgggagaccg

SEQ ID NO: 47660 - DNA, 19 bp, Homo Sapiens
ctgtcacgcgggagaccgg

SEQ ID NO: 47661 - DNA, 20 bp, Homo Sapiens
ctgtcacgcgggagaccggg

SEQ ID NO: 47662 - DNA, 21 bp, Homo Sapiens
ctgtcacgcgggagaccgggg

SEQ ID NO: 47663 - DNA, 22 bp, Homo Sapiens
ctgtcacgcgggagaccggggt

SEQ ID NO: 47664 - DNA, 23 bp, Homo Sapiens
ctgtcacgcgggagaccggggtt

SEQ ID NO: 47665 - DNA, 24 bp, Homo Sapiens
ctgtcacgcgggagaccggggttc

SEQ ID NO: 47666 - DNA, 39 bp, Homo Sapiens; identical to SEQ ID NO: 36558

SEQ ID NO: 47667 - DNA, 40 bp, Homo Sapiens; identical to SEQ ID NO: 14361

SEQ ID NO: 47668 - DNA, 42 bp, Homo Sapiens; identical to SEQ ID NO: 14362

SEQ ID NO: 47669 - DNA, 44 bp, Homo Sapiens; identical to SEQ ID NO: 14364

SEQ ID NO: 47670 - DNA, 25 bp, Homo Sapiens
ctgtcacgcgggagaccggggttcg

SEQ ID NO: 47671 - DNA, 26 bp, Homo Sapiens
ctgtcacgcgggagaccggggttcga

SEQ ID NO: 47672 - DNA, 28 bp, Homo Sapiens
ctgtcacgcgggagaccggggttcgatt

SEQ ID NO: 47673 - DNA, 29 bp, Homo Sapiens
ctgtcacgcgggagaccggggttcgattc

SEQ ID NO: 47674 - DNA, 30 bp, Homo Sapiens; identical to SEQ ID NO: 36564

SEQ ID NO: 47675 - DNA, 31 bp, Homo Sapiens
ctgtcacgcgggagaccggggttcgattccc

SEQ ID NO: 47676 - DNA, 34 bp, Homo Sapiens; identical to SEQ ID NO: 14368

SEQ ID NO: 47677 - DNA, 35 bp, Homo Sapiens; identical to SEQ ID NO: 14369

SEQ ID NO: 47678 - DNA, 36 bp, Homo Sapiens; identical to SEQ ID NO: 14370

SEQ ID NO: 47679 - DNA, 37 bp, Homo Sapiens; identical to SEQ ID NO: 14371

SEQ ID NO: 47680 - DNA, 38 bp, Homo Sapiens; identical to SEQ ID NO: 14372

SEQ ID NO: 47681 - DNA, 39 bp, Homo Sapiens; identical to SEQ ID NO: 14373

SEQ ID NO: 47682 - DNA, 41 bp, Homo Sapiens; identical to SEQ ID NO: 14374

SEQ ID NO: 47683 - DNA, 42 bp, Homo Sapiens; identical to SEQ ID NO: 14375

SEQ ID NO: 47684 - DNA, 43 bp, Homo Sapiens; identical to SEQ ID NO: 14376

SEQ ID NO: 47685 - DNA, 44 bp, Homo Sapiens; identical to SEQ ID NO: 14377

SEQ ID NO: 47686 - DNA, 44 bp, Homo Sapiens; identical to SEQ ID NO: 36577

SEQ ID NO: 47687 - DNA, 22 bp, Homo Sapiens
cttaaacccccttatttctacc

SEQ ID NO: 47688 - DNA, 18 bp, Homo Sapiens
cttaacacaaagcaccca

SEQ ID NO: 47689 - DNA, 19 bp, Homo Sapiens
cttaacacaaagcacccaa

SEQ ID NO: 47690 - DNA, 18 bp, Homo Sapiens
cttaacttgaccgctctg

SEQ ID NO: 47691 - DNA, 19 bp, Homo Sapiens
cttaacttgaccgctctga

SEQ ID NO: 47692 - DNA, 20 bp, Homo Sapiens
cttaacttgaccgctctgac

SEQ ID NO: 47693 - DNA, 21 bp, Homo Sapiens
cttaacttgaccgctctgacc

SEQ ID NO: 47694 - DNA, 22 bp, Homo Sapiens
cttaacttgaccgctctgacca

SEQ ID NO: 47695 - DNA, 17 bp, Homo Sapiens
cttaagatccaatggac

SEQ ID NO: 47696 - DNA, 18 bp, Homo Sapiens
cttaagatccaatggaca

SEQ ID NO: 47697 - DNA, 19 bp, Homo Sapiens
cttaagatccaatggacat

SEQ ID NO: 47698 - DNA, 16 bp, Homo Sapiens
cttaatcccagggtcg

SEQ ID NO: 47699 - DNA, 17 bp, Homo Sapiens
cttaatcccagggtcgt

SEQ ID NO: 47700 - DNA, 42 bp, Homo Sapiens; identical to SEQ ID NO: 14476

SEQ ID NO: 47701 - DNA, 33 bp, Homo Sapiens; identical to SEQ ID NO: 14500

SEQ ID NO: 47702 - DNA, 39 bp, Homo Sapiens; identical to SEQ ID NO: 14506

SEQ ID NO: 47703 - DNA, 40 bp, Homo Sapiens; identical to SEQ ID NO: 14507

SEQ ID NO: 47704 - DNA, 41 bp, Homo Sapiens; identical to SEQ ID NO: 14508

SEQ ID NO: 47705 - DNA, 42 bp, Homo Sapiens; identical to SEQ ID NO: 14509

SEQ ID NO: 47706 - DNA, 43 bp, Homo Sapiens; identical to SEQ ID NO: 14510

SEQ ID NO: 47707 - DNA, 21 bp, Homo Sapiens
cttacgaccccttatttaccc

SEQ ID NO: 47708 - DNA, 22 bp, Homo Sapiens
cttacgaccccttatttacccc

SEQ ID NO: 47709 - DNA, 23 bp, Homo Sapiens
cttacgaccccttatttacccca

SEQ ID NO: 47710 - DNA, 31 bp, Homo Sapiens; identical to SEQ ID NO: 14541

SEQ ID NO: 47711 - DNA, 46 bp, Homo Sapiens; identical to SEQ ID NO: 14566

SEQ ID NO: 47712 - DNA, 47 bp, Homo Sapiens; identical to SEQ ID NO: 14567

SEQ ID NO: 47713 - DNA, 18 bp, Homo Sapiens
cttaggagatttcaactt

SEQ ID NO: 47714 - DNA, 27 bp, Homo Sapiens
cttaggagatttcaacttaacttgacc

SEQ ID NO: 47715 - DNA, 28 bp, Homo Sapiens
cttaggagatttcaacttaacttgaccg

SEQ ID NO: 47716 - DNA, 30 bp, Homo Sapiens; identical to SEQ ID NO: 14583

SEQ ID NO: 47717 - DNA, 32 bp, Homo Sapiens; identical to SEQ ID NO: 14585

SEQ ID NO: 47718 - DNA, 33 bp, Homo Sapiens; identical to SEQ ID NO: 14586

SEQ ID NO: 47719 - DNA, 34 bp, Homo Sapiens; identical to SEQ ID NO: 14587

SEQ ID NO: 47720 - DNA, 35 bp, Homo Sapiens; identical to SEQ ID NO: 14588

SEQ ID NO: 47721 - DNA, 36 bp, Homo Sapiens; identical to SEQ ID NO: 14589

SEQ ID NO: 47722 - DNA, 37 bp, Homo Sapiens; identical to SEQ ID NO: 14590

SEQ ID NO: 47723 - DNA, 34 bp, Homo Sapiens; identical to SEQ ID NO: 14594

SEQ ID NO: 47724 - DNA, 35 bp, Homo Sapiens; identical to SEQ ID NO: 14595

SEQ ID NO: 47725 - DNA, 35 bp, Homo Sapiens; identical to SEQ ID NO: 14600

SEQ ID NO: 47726 - DNA, 17 bp, Homo Sapiens
cttcaaacctgccgggg

SEQ ID NO: 47727 - DNA, 18 bp, Homo Sapiens
cttcaaacctgccggggc

SEQ ID NO: 47728 - DNA, 19 bp, Homo Sapiens
cttcaaacctgccggggct

SEQ ID NO: 47729 - DNA, 20 bp, Homo Sapiens
cttcaaacctgccggggctt

SEQ ID NO: 47730 - DNA, 22 bp, Homo Sapiens
cttcaaacctgccggggcttcc

SEQ ID NO: 47731 - DNA, 23 bp, Homo Sapiens
cttcaaacctgccggggcttcca

SEQ ID NO: 47732 - DNA, 16 bp, Homo Sapiens
cttccaagcagttgac

SEQ ID NO: 47733 - DNA, 17 bp, Homo Sapiens
cttccaagcagttgacc

SEQ ID NO: 47734 - DNA, 20 bp, Homo Sapiens
cttccaagcagttgacccgg

SEQ ID NO: 47735 - DNA, 22 bp, Homo Sapiens
cttccaagcagttgacccgggt

SEQ ID NO: 47736 - DNA, 22 bp, Homo Sapiens
cttccaattaactagttttgac

SEQ ID NO: 47737 - DNA, 42 bp, Homo Sapiens; identical to SEQ ID NO: 14638

SEQ ID NO: 47738 - DNA, 17 bp, Homo Sapiens
cttcggaggcgtgggtt

SEQ ID NO: 47739 - DNA, 26 bp, Homo Sapiens
cttcggaggcgtgggttcgaatccca

SEQ ID NO: 47740 - DNA, 25 bp, Homo Sapiens
cttcggatcagaagattgagggttc

SEQ ID NO: 47741 - DNA, 25 bp, Homo Sapiens
cttcggatcagaagattgcaggttc

SEQ ID NO: 47742 - DNA, 16 bp, Homo Sapiens
cttcgggggcgtgggt

SEQ ID NO: 47743 - DNA, 37 bp, Homo Sapiens; identical to SEQ ID NO: 14666

SEQ ID NO: 47744 - DNA, 23 bp, Homo Sapiens
cttctaattcaaaggttccgggt

SEQ ID NO: 47745 - DNA, 32 bp, Homo Sapiens; identical to SEQ ID NO: 14673

SEQ ID NO: 47746 - DNA, 16 bp, Homo Sapiens
cttgaccgctctgacc

SEQ ID NO: 47747 - DNA, 17 bp, Homo Sapiens
cttgaccgctctgacca

SEQ ID NO: 47748 - DNA, 33 bp, Homo Sapiens
cttgcgacccgggttcgattcccgggcggcgca

SEQ ID NO: 47749 - DNA, 35 bp, Homo Sapiens; identical to SEQ ID NO: 14685

SEQ ID NO: 47750 - DNA, 45 bp, Homo Sapiens; identical to SEQ ID NO: 14698

SEQ ID NO: 47751 - DNA, 19 bp, Homo Sapiens
ctttgaatccagcgatccg

SEQ ID NO: 47752 - DNA, 20 bp, Homo Sapiens
ctttgaatccagcgatccga

SEQ ID NO: 47753 - DNA, 21 bp, Homo Sapiens
ctttgaatccagcgatccgag

SEQ ID NO: 47754 - DNA, 22 bp, Homo Sapiens
ctttgaatccagcgatccgagt

SEQ ID NO: 47755 - DNA, 23 bp, Homo Sapiens
ctttgaatccagcgatccgagtt

SEQ ID NO: 47756 - DNA, 30 bp, Homo Sapiens
ctttgcacgcgtgggttcgaatcccatcct

SEQ ID NO: 47757 - DNA, 37 bp, Homo Sapiens; identical to SEQ ID NO: 14763

SEQ ID NO: 47758 - DNA, 39 bp, Homo Sapiens
ctttgcacgtatgaggccccgggttcaatccccggcatc

SEQ ID NO: 47759 - DNA, 41 bp, Homo Sapiens; identical to SEQ ID NO: 14768

SEQ ID NO: 47760 - DNA, 45 bp, Homo Sapiens; identical to SEQ ID NO: 36664

SEQ ID NO: 47761 - DNA, 21 bp, Homo Sapiens
ctttgggtgcgagaggtcccg

SEQ ID NO: 47762 - DNA, 44 bp, Homo Sapiens; identical to SEQ ID NO: 14776

SEQ ID NO: 47763 - DNA, 42 bp, Homo Sapiens; identical to SEQ ID NO: 14797

SEQ ID NO: 47764 - DNA, 43 bp, Homo Sapiens; identical to SEQ ID NO: 14798

SEQ ID NO: 47765 - DNA, 26 bp, Homo Sapiens
cttttaagttaaagattaagagaacc

SEQ ID NO: 47766 - DNA, 45 bp, Homo Sapiens; identical to SEQ ID NO: 14847

SEQ ID NO: 47767 - DNA, 46 bp, Homo Sapiens; identical to SEQ ID NO: 14848

SEQ ID NO: 47768 - DNA, 16 bp, Homo Sapiens
ctttttccaaggacac

SEQ ID NO: 47769 - DNA, 17 bp, Homo Sapiens
ctttttccaaggacacc

SEQ ID NO: 47770 - DNA, 18 bp, Homo Sapiens
ctttttccaaggacacca

SEQ ID NO: 47771 - DNA, 16 bp, Homo Sapiens
gaaaaagtcatggagg

SEQ ID NO: 47772 - DNA, 17 bp, Homo Sapiens
gaaaaagtcatggaggc

SEQ ID NO: 47773 - DNA, 18 bp, Homo Sapiens
gaaaaagtcatggaggcc

SEQ ID NO: 47774 - DNA, 19 bp, Homo Sapiens
gaaaaagtcatggaggcca

SEQ ID NO: 47775 - DNA, 21 bp, Homo Sapiens
gaaaaagtcatggaggccatg

SEQ ID NO: 47776 - DNA, 24 bp, Homo Sapiens
gaaaaagtcatggaggccatgggg

SEQ ID NO: 47777 - DNA, 25 bp, Homo Sapiens
gaaaaagtcatggaggccatggggt

SEQ ID NO: 47778 - DNA, 26 bp, Homo Sapiens
gaaaaagtcatggaggccatggggtt

SEQ ID NO: 47779 - DNA, 27 bp, Homo Sapiens
gaaaaagtcatggaggccatggggttg

SEQ ID NO: 47780 - DNA, 28 bp, Homo Sapiens
gaaaaagtcatggaggccatggggttgg

SEQ ID NO: 47781 - DNA, 30 bp, Homo Sapiens; identical to SEQ ID NO: 14877

SEQ ID NO: 47782 - DNA, 23 bp, Homo Sapiens
gaaaacctttttccaaggacacc

SEQ ID NO: 47783 - DNA, 17 bp, Homo Sapiens
gaaaatgttggttatac

SEQ ID NO: 47784 - DNA, 25 bp, Homo Sapiens
gaaaatgttggttatacccttcccg

SEQ ID NO: 47785 - DNA, 30 bp, Homo Sapiens; identical to SEQ ID NO: 14908

SEQ ID NO: 47786 - DNA, 31 bp, Homo Sapiens; identical to SEQ ID NO: 14909

SEQ ID NO: 47787 - DNA, 32 bp, Homo Sapiens; identical to SEQ ID NO: 14910

SEQ ID NO: 47788 - DNA, 33 bp, Homo Sapiens; identical to SEQ ID NO: 14911

SEQ ID NO: 47789 - DNA, 18 bp, Homo Sapiens
gaaaatgtttagacgggc

SEQ ID NO: 47790 - DNA, 19 bp, Homo Sapiens
gaaaatgtttagacgggct

SEQ ID NO: 47791 - DNA, 20 bp, Homo Sapiens
gaaaatgtttagacgggctc

SEQ ID NO: 47792 - DNA, 21 bp, Homo Sapiens
gaaaatgtttagacgggctca

SEQ ID NO: 47793 - DNA, 22 bp, Homo Sapiens
gaaaatgtttagacgggctcac

SEQ ID NO: 47794 - DNA, 23 bp, Homo Sapiens
gaaaatgtttagacgggctcaca

SEQ ID NO: 47795 - DNA, 25 bp, Homo Sapiens
gaaaatgtttagacgggctcacatc

SEQ ID NO: 47796 - DNA, 28 bp, Homo Sapiens
gaaaatgtttagacgggctcacatcacc

SEQ ID NO: 47797 - DNA, 29 bp, Homo Sapiens
gaaaatgtttagacgggctcacatcaccc

SEQ ID NO: 47798 - DNA, 30 bp, Homo Sapiens; identical to SEQ ID NO: 14926

SEQ ID NO: 47799 - DNA, 31 bp, Homo Sapiens; identical to SEQ ID NO: 14927

SEQ ID NO: 47800 - DNA, 35 bp, Homo Sapiens; identical to SEQ ID NO: 14931

SEQ ID NO: 47801 - DNA, 39 bp, Homo Sapiens; identical to SEQ ID NO: 14934

SEQ ID NO: 47802 - DNA, 40 bp, Homo Sapiens; identical to SEQ ID NO: 14935

SEQ ID NO: 47803 - DNA, 19 bp, Homo Sapiens
gaaaccgggcagaagcacc

SEQ ID NO: 47804 - DNA, 17 bp, Homo Sapiens
gaaaccgggcggaaaca

SEQ ID NO: 47805 - DNA, 18 bp, Homo Sapiens
gaaaccgggcggaaacac

SEQ ID NO: 47806 - DNA, 19 bp, Homo Sapiens
gaaaccgggcggaaacacc

SEQ ID NO: 47807 - DNA, 20 bp, Homo Sapiens
gaaaccgggcggaaacacca

SEQ ID NO: 47808 - DNA, 24 bp, Homo Sapiens
gaaagctcacaagaactgctaact

SEQ ID NO: 47809 - DNA, 33 bp, Homo Sapiens; identical to SEQ ID NO: 14966

SEQ ID NO: 47810 - DNA, 16 bp, Homo Sapiens
gaaaggttggtggttc

SEQ ID NO: 47811 - DNA, 17 bp, Homo Sapiens
gaaaggttggtggttcg

SEQ ID NO: 47812 - DNA, 32 bp, Homo Sapiens; identical to SEQ ID NO: 14988

SEQ ID NO: 47813 - DNA, 35 bp, Homo Sapiens; identical to SEQ ID NO: 14991

SEQ ID NO: 47814 - DNA, 44 bp, Homo Sapiens; identical to SEQ ID NO: 15004

SEQ ID NO: 47815 - DNA, 46 bp, Homo Sapiens; identical to SEQ ID NO: 15006

SEQ ID NO: 47816 - DNA, 24 bp, Homo Sapiens
gaaccaacacctctttacagtgac

SEQ ID NO: 47817 - DNA, 25 bp, Homo Sapiens
gaaccaacacctctttacagtgacc

SEQ ID NO: 47818 - DNA, 20 bp, Homo Sapiens
gaaccctgctcgctgcgcca

SEQ ID NO: 47819 - DNA, 31 bp, Homo Sapiens; identical to SEQ ID NO: 15041

SEQ ID NO: 47820 - DNA, 34 bp, Homo Sapiens; identical to SEQ ID NO: 15044

SEQ ID NO: 47821 - DNA, 39 bp, Homo Sapiens; identical to SEQ ID NO: 15049

SEQ ID NO: 47822 - DNA, 47 bp, Homo Sapiens; identical to SEQ ID NO: 15057

SEQ ID NO: 47823 - DNA, 28 bp, Homo Sapiens
gaagaagcagcttcaaacctgccggggc

SEQ ID NO: 47824 - DNA, 29 bp, Homo Sapiens
gaagaagcagcttcaaacctgccggggct

SEQ ID NO: 47825 - DNA, 30 bp, Homo Sapiens; identical to SEQ ID NO: 15062

SEQ ID NO: 47826 - DNA, 32 bp, Homo Sapiens; identical to SEQ ID NO: 15070

SEQ ID NO: 47827 - DNA, 33 bp, Homo Sapiens; identical to SEQ ID NO: 15071

SEQ ID NO: 47828 - DNA, 34 bp, Homo Sapiens; identical to SEQ ID NO: 15072

SEQ ID NO: 47829 - DNA, 34 bp, Homo Sapiens; identical to SEQ ID NO: 15089

SEQ ID NO: 47830 - DNA, 33 bp, Homo Sapiens; identical to SEQ ID NO: 15098

SEQ ID NO: 47831 - DNA, 34 bp, Homo Sapiens; identical to SEQ ID NO: 15099

SEQ ID NO: 47832 - DNA, 35 bp, Homo Sapiens; identical to SEQ ID NO: 15100

SEQ ID NO: 47833 - DNA, 23 bp, Homo Sapiens
gaagattgcaggttcgagtcctg

SEQ ID NO: 47834 - DNA, 33 bp, Homo Sapiens; identical to SEQ ID NO: 15104

SEQ ID NO: 47835 - DNA, 34 bp, Homo Sapiens; identical to SEQ ID NO: 15105

SEQ ID NO: 47836 - DNA, 35 bp, Homo Sapiens; identical to SEQ ID NO: 15106

SEQ ID NO: 47837 - DNA, 25 bp, Homo Sapiens
gaagcagcttcaaacctgccggggc

SEQ ID NO: 47838 - DNA, 26 bp, Homo Sapiens
gaagcagcttcaaacctgccggggct

SEQ ID NO: 47839 - DNA, 27 bp, Homo Sapiens
gaagcagcttcaaacctgccggggctt

SEQ ID NO: 47840 - DNA, 16 bp, Homo Sapiens
gaagcgtgctgggccc

SEQ ID NO: 47841 - DNA, 23 bp, Homo Sapiens
gaagcgtgctgggcccataaccc

SEQ ID NO: 47842 - DNA, 31 bp, Homo Sapiens; identical to SEQ ID NO: 15143

SEQ ID NO: 47843 - DNA, 32 bp, Homo Sapiens; identical to SEQ ID NO: 15144

SEQ ID NO: 47844 - DNA, 33 bp, Homo Sapiens; identical to SEQ ID NO: 15145

SEQ ID NO: 47845 - DNA, 34 bp, Homo Sapiens; identical to SEQ ID NO: 15146

SEQ ID NO: 47846 - DNA, 21 bp, Homo Sapiens
gaaggtcctgagttcgaacct

SEQ ID NO: 47847 - DNA, 33 bp, Homo Sapiens; identical to SEQ ID NO: 15162

SEQ ID NO: 47848 - DNA, 34 bp, Homo Sapiens; identical to SEQ ID NO: 15163

SEQ ID NO: 47849 - DNA, 35 bp, Homo Sapiens; identical to SEQ ID NO: 15164

SEQ ID NO: 47850 - DNA, 16 bp, Homo Sapiens
gaaggttgcgtgttca

SEQ ID NO: 47851 - DNA, 19 bp, Homo Sapiens
gaatcacgtcggggtcacc

SEQ ID NO: 47852 - DNA, 20 bp, Homo Sapiens
gaatcacgtcggggtcacca

SEQ ID NO: 47853 - DNA, 20 bp, Homo Sapiens
gaatccagcgatccgagttc

SEQ ID NO: 47854 - DNA, 37 bp, Homo Sapiens; identical to SEQ ID NO: 15197

SEQ ID NO: 47855 - DNA, 19 bp, Homo Sapiens
gaatcccaccgctgccacc

SEQ ID NO: 47856 - DNA, 19 bp, Homo Sapiens
gaatcccacttctgacacc

SEQ ID NO: 47857 - DNA, 20 bp, Homo Sapiens
gaatcccagcggtgcctcca

SEQ ID NO: 47858 - DNA, 18 bp, Homo Sapiens
gaatcccatcctcgtcgc

SEQ ID NO: 47859 - DNA, 19 bp, Homo Sapiens
gaatcccatcctcgtcgcc

SEQ ID NO: 47860 - DNA, 20 bp, Homo Sapiens
gaatcccatcctcgtcgcca

SEQ ID NO: 47861 - DNA, 18 bp, Homo Sapiens
gaatccgagtcacggcac

SEQ ID NO: 47862 - DNA, 20 bp, Homo Sapiens
gaatccgagtcacggcacca

SEQ ID NO: 47863 - DNA, 18 bp, Homo Sapiens
gaatccggctcgaaggac

SEQ ID NO: 47864 - DNA, 19 bp, Homo Sapiens
gaatccggctcgaaggacc

SEQ ID NO: 47865 - DNA, 20 bp, Homo Sapiens
gaatccggctcgaaggacca

SEQ ID NO: 47866 - DNA, 19 bp, Homo Sapiens
gaatccggctcggaggacc

SEQ ID NO: 47867 - DNA, 19 bp, Homo Sapiens
gaatcctgccgactacgcc

SEQ ID NO: 47868 - DNA, 19 bp, Homo Sapiens
gaatcctgttcgtgacgcc

SEQ ID NO: 47869 - DNA, 16 bp, Homo Sapiens
gaattctcgcctgcca

SEQ ID NO: 47870 - DNA, 17 bp, Homo Sapiens
gaattctcgcctgccac

SEQ ID NO: 47871 - DNA, 18 bp, Homo Sapiens
gaattctcgcctgccacg

SEQ ID NO: 47872 - DNA, 34 bp, Homo Sapiens; identical to SEQ ID NO: 15264

SEQ ID NO: 47873 - DNA, 41 bp, Homo Sapiens; identical to SEQ ID NO: 15266

SEQ ID NO: 47874 - DNA, 42 bp, Homo Sapiens; identical to SEQ ID NO: 15267

SEQ ID NO: 47875 - DNA, 43 bp, Homo Sapiens; identical to SEQ ID NO: 15268

SEQ ID NO: 47876 - DNA, 45 bp, Homo Sapiens; identical to SEQ ID NO: 15270

SEQ ID NO: 47877 - DNA, 46 bp, Homo Sapiens; identical to SEQ ID NO: 15271

SEQ ID NO: 47878 - DNA, 19 bp, Homo Sapiens
gaccacgtggcctaatgga

SEQ ID NO: 47879 - DNA, 33 bp, Homo Sapiens; identical to SEQ ID NO: 15309

SEQ ID NO: 47880 - DNA, 19 bp, Homo Sapiens
gacccagtggcctaatgga

SEQ ID NO: 47881 - DNA, 31 bp, Homo Sapiens; identical to SEQ ID NO: 15319

SEQ ID NO: 47882 - DNA, 32 bp, Homo Sapiens; identical to SEQ ID NO: 15320

SEQ ID NO: 47883 - DNA, 33 bp, Homo Sapiens; identical to SEQ ID NO: 15321

SEQ ID NO: 47884 - DNA, 34 bp, Homo Sapiens; identical to SEQ ID NO: 15322

SEQ ID NO: 47885 - DNA, 35 bp, Homo Sapiens; identical to SEQ ID NO: 15323

SEQ ID NO: 47886 - DNA, 36 bp, Homo Sapiens; identical to SEQ ID NO: 15324

SEQ ID NO: 47887 - DNA, 16 bp, Homo Sapiens
gaccccttatttaccc

SEQ ID NO: 47888 - DNA, 30 bp, Homo Sapiens; identical to SEQ ID NO: 15331

SEQ ID NO: 47889 - DNA, 31 bp, Homo Sapiens; identical to SEQ ID NO: 15332

SEQ ID NO: 47890 - DNA, 18 bp, Homo Sapiens
gaccgcgtggcctaatgg

SEQ ID NO: 47891 - DNA, 19 bp, Homo Sapiens
gaccgcgtggcctaatgga

SEQ ID NO: 47892 - DNA, 30 bp, Homo Sapiens; identical to SEQ ID NO: 15337

SEQ ID NO: 47893 - DNA, 32 bp, Homo Sapiens; identical to SEQ ID NO: 15338

SEQ ID NO: 47894 - DNA, 33 bp, Homo Sapiens; identical to SEQ ID NO: 15339

SEQ ID NO: 47895 - DNA, 34 bp, Homo Sapiens; identical to SEQ ID NO: 15340

SEQ ID NO: 47896 - DNA, 36 bp, Homo Sapiens; identical to SEQ ID NO: 15342

SEQ ID NO: 47897 - DNA, 29 bp, Homo Sapiens
gaccggggttcaattccccgacggggagc

SEQ ID NO: 47898 - DNA, 30 bp, Homo Sapiens; identical to SEQ ID NO: 15344

SEQ ID NO: 47899 - DNA, 29 bp, Homo Sapiens
gaccggggttcgattccccgacggggagc

SEQ ID NO: 47900 - DNA, 30 bp, Homo Sapiens; identical to SEQ ID NO: 15351

SEQ ID NO: 47901 - DNA, 31 bp, Homo Sapiens; identical to SEQ ID NO: 15352

SEQ ID NO: 47902 - DNA, 17 bp, Homo Sapiens
gacctcgtggcgcaacg

SEQ ID NO: 47903 - DNA, 18 bp, Homo Sapiens
gacctcgtggcgcaacgg

SEQ ID NO: 47904 - DNA, 31 bp, Homo Sapiens; identical to SEQ ID NO: 15357

SEQ ID NO: 47905 - DNA, 32 bp, Homo Sapiens; identical to SEQ ID NO: 15358

SEQ ID NO: 47906 - DNA, 33 bp, Homo Sapiens; identical to SEQ ID NO: 15359

SEQ ID NO: 47907 - DNA, 34 bp, Homo Sapiens; identical to SEQ ID NO: 15360

SEQ ID NO: 47908 - DNA, 18 bp, Homo Sapiens
gacctcgtggcgcaatgg

SEQ ID NO: 47909 - DNA, 32 bp, Homo Sapiens; identical to SEQ ID NO: 15365

SEQ ID NO: 47910 - DNA, 16 bp, Homo Sapiens
gacgaggtggccgagt

SEQ ID NO: 47911 - DNA, 18 bp, Homo Sapiens
gacgaggtggccgagtgg

SEQ ID NO: 47912 - DNA, 19 bp, Homo Sapiens
gacgaggtggccgagtggt

SEQ ID NO: 47913 - DNA, 23 bp, Homo Sapiens
gacgaggtggccgagtggttaag

SEQ ID NO: 47914 - DNA, 24 bp, Homo Sapiens
gacgaggtggccgagtggttaagg

SEQ ID NO: 47915 - DNA, 25 bp, Homo Sapiens
gacgaggtggccgagtggttaaggc

SEQ ID NO: 47916 - DNA, 32 bp, Homo Sapiens; identical to SEQ ID NO: 15378

SEQ ID NO: 47917 - DNA, 33 bp, Homo Sapiens; identical to SEQ ID NO: 15379

SEQ ID NO: 47918 - DNA, 36 bp, Homo Sapiens; identical to SEQ ID NO: 15381

SEQ ID NO: 47919 - DNA, 29 bp, Homo Sapiens
gacgggctcacatcaccccataaacacca

SEQ ID NO: 47920 - DNA, 21 bp, Homo Sapiens
gactccagatcagaaggctgc

SEQ ID NO: 47921 - DNA, 27 bp, Homo Sapiens
gactccagatcagaaggctgcgtgttc

SEQ ID NO: 47922 - DNA, 18 bp, Homo Sapiens
gactcccggtatgggaac

SEQ ID NO: 47923 - DNA, 16 bp, Homo Sapiens
gactcccggtgtggga

SEQ ID NO: 47924 - DNA, 17 bp, Homo Sapiens
gactcccggtgtgggaa

SEQ ID NO: 47925 - DNA, 18 bp, Homo Sapiens
gactcccggtgtgggaac

SEQ ID NO: 47926 - DNA, 19 bp, Homo Sapiens
gactcccggtgtgggaacc

SEQ ID NO: 47927 - DNA, 17 bp, Homo Sapiens
gactcctggctggctcg

SEQ ID NO: 47928 - DNA, 18 bp, Homo Sapiens
gactcctggctggctcgc

SEQ ID NO: 47929 - DNA, 19 bp, Homo Sapiens
gactcctggctggctcgcc

SEQ ID NO: 47930 - DNA, 20 bp, Homo Sapiens
gactcctggctggctcgcca

SEQ ID NO: 47931 - DNA, 43 bp, Homo Sapiens; identical to SEQ ID NO: 15425

SEQ ID NO: 47932 - DNA, 45 bp, Homo Sapiens; identical to SEQ ID NO: 15427

SEQ ID NO: 47933 - DNA, 16 bp, Homo Sapiens
gactttttctctgacc

SEQ ID NO: 47934 - DNA, 17 bp, Homo Sapiens
gactttttctctgacca

SEQ ID NO: 47935 - DNA, 18 bp, Homo Sapiens
gagaaagctcacaagaac

SEQ ID NO: 47936 - DNA, 19 bp, Homo Sapiens
gagaaagctcacaagaact

SEQ ID NO: 47937 - DNA, 20 bp, Homo Sapiens
gagaaagctcacaagaactg

SEQ ID NO: 47938 - DNA, 21 bp, Homo Sapiens
gagaaagctcacaagaactgc

SEQ ID NO: 47939 - DNA, 22 bp, Homo Sapiens
gagaaagctcacaagaactgct

SEQ ID NO: 47940 - DNA, 23 bp, Homo Sapiens
gagaaagctcacaagaactgcta

SEQ ID NO: 47941 - DNA, 25 bp, Homo Sapiens
gagaaagctcacaagaactgctaac

SEQ ID NO: 47942 - DNA, 26 bp, Homo Sapiens
gagaaagctcacaagaactgctaact

SEQ ID NO: 47943 - DNA, 27 bp, Homo Sapiens
gagaaagctcacaagaactgctaactc

SEQ ID NO: 47944 - DNA, 28 bp, Homo Sapiens
gagaaagctcacaagaactgctaactca

SEQ ID NO: 47945 - DNA, 32 bp, Homo Sapiens; identical to SEQ ID NO: 15487

SEQ ID NO: 47946 - DNA, 33 bp, Homo Sapiens; identical to SEQ ID NO: 15488

SEQ ID NO: 47947 - DNA, 34 bp, Homo Sapiens; identical to SEQ ID NO: 15489

SEQ ID NO: 47948 - DNA, 35 bp, Homo Sapiens; identical to SEQ ID NO: 15490

SEQ ID NO: 47949 - DNA, 38 bp, Homo Sapiens; identical to SEQ ID NO: 15493

SEQ ID NO: 47950 - DNA, 41 bp, Homo Sapiens; identical to SEQ ID NO: 15496

SEQ ID NO: 47951 - DNA, 44 bp, Homo Sapiens; identical to SEQ ID NO: 15499

SEQ ID NO: 47952 - DNA, 45 bp, Homo Sapiens; identical to SEQ ID NO: 15500

SEQ ID NO: 47953 - DNA, 26 bp, Homo Sapiens
gagaaccaacacctctttacagtgac

SEQ ID NO: 47954 - DNA, 31 bp, Homo Sapiens; identical to SEQ ID NO: 15532

SEQ ID NO: 47955 - DNA, 32 bp, Homo Sapiens; identical to SEQ ID NO: 15533

SEQ ID NO: 47956 - DNA, 17 bp, Homo Sapiens
gagaccggggttcgatt

SEQ ID NO: 47957 - DNA, 18 bp, Homo Sapiens
gagaccggggttcgattc

SEQ ID NO: 47958 - DNA, 23 bp, Homo Sapiens
gagaccggggttcgattccccga

SEQ ID NO: 47959 - DNA, 24 bp, Homo Sapiens
gagaccggggttcgattccccgac

SEQ ID NO: 47960 - DNA, 27 bp, Homo Sapiens
gagaccggggttcgattccccgacggg

SEQ ID NO: 47961 - DNA, 29 bp, Homo Sapiens
gagaccggggttcgattccccgacgggga

SEQ ID NO: 47962 - DNA, 30 bp, Homo Sapiens; identical to SEQ ID NO: 15542

SEQ ID NO: 47963 - DNA, 31 bp, Homo Sapiens; identical to SEQ ID NO: 15543

SEQ ID NO: 47964 - DNA, 32 bp, Homo Sapiens; identical to SEQ ID NO: 15544

SEQ ID NO: 47965 - DNA, 33 bp, Homo Sapiens; identical to SEQ ID NO: 15545

SEQ ID NO: 47966 - DNA, 16 bp, Homo Sapiens
gagagcattagactga

SEQ ID NO: 47967 - DNA, 16 bp, Homo Sapiens
gagagcgttagactga

SEQ ID NO: 47968 - DNA, 16 bp, Homo Sapiens
gagaggtcccgggttc

SEQ ID NO: 47969 - DNA, 34 bp, Homo Sapiens; identical to SEQ ID NO: 15557

SEQ ID NO: 47970 - DNA, 29 bp, Homo Sapiens
gagatcctgggttcgaatcccagcggggc

SEQ ID NO: 47971 - DNA, 24 bp, Homo Sapiens
gagatgaaaacctttttccaagga

SEQ ID NO: 47972 - DNA, 25 bp, Homo Sapiens
gagatgaaaacctttttccaaggac

SEQ ID NO: 47973 - DNA, 26 bp, Homo Sapiens
gagatgaaaacctttttccaaggaca

SEQ ID NO: 47974 - DNA, 27 bp, Homo Sapiens
gagatgaaaacctttttccaaggacac

SEQ ID NO: 47975 - DNA, 28 bp, Homo Sapiens
gagatgaaaacctttttccaaggacacc

SEQ ID NO: 47976 - DNA, 29 bp, Homo Sapiens
gagatgaaaacctttttccaaggacacca

SEQ ID NO: 47977 - DNA, 26 bp, Homo Sapiens
gagatttcaacttaacttgaccgctc

SEQ ID NO: 47978 - DNA, 28 bp, Homo Sapiens
gagatttcaacttaacttgaccgctctg

SEQ ID NO: 47979 - DNA, 29 bp, Homo Sapiens
gagatttcaacttaacttgaccgctctga

SEQ ID NO: 47980 - DNA, 30 bp, Homo Sapiens; identical to SEQ ID NO: 15583

SEQ ID NO: 47981 - DNA, 31 bp, Homo Sapiens; identical to SEQ ID NO: 15584

SEQ ID NO: 47982 - DNA, 32 bp, Homo Sapiens; identical to SEQ ID NO: 15585

SEQ ID NO: 47983 - DNA, 20 bp, Homo Sapiens
gagcatgggactcttaatcc

SEQ ID NO: 47984 - DNA, 36 bp, Homo Sapiens; identical to SEQ ID NO: 15610

SEQ ID NO: 47985 - DNA, 18 bp, Homo Sapiens
gagccccagtggaaccac

SEQ ID NO: 47986 - DNA, 19 bp, Homo Sapiens
gagccccagtggaaccacc

SEQ ID NO: 47987 - DNA, 20 bp, Homo Sapiens
gagccccagtggaaccacca

SEQ ID NO: 47988 - DNA, 45 bp, Homo Sapiens
gagcccggtaatcgcataaaacttaaaactttacagtcagaggtt

SEQ ID NO: 47989 - DNA, 18 bp, Homo Sapiens
gagcggtctaaggcgctg

SEQ ID NO: 47990 - DNA, 18 bp, Homo Sapiens
gagctggggattgtgggt

SEQ ID NO: 47991 - DNA, 39 bp, Homo Sapiens; identical to SEQ ID NO: 15644

SEQ ID NO: 47992 - DNA, 16 bp, Homo Sapiens
gagcttaaaccccctt

SEQ ID NO: 47993 - DNA, 25 bp, Homo Sapiens
gagcttaaacccccttatttctacc

SEQ ID NO: 47994 - DNA, 26 bp, Homo Sapiens
gagcttaaacccccttatttctacca

SEQ ID NO: 47995 - DNA, 34 bp, Homo Sapiens; identical to SEQ ID NO: 15658

SEQ ID NO: 47996 - DNA, 34 bp, Homo Sapiens; identical to SEQ ID NO: 15662

SEQ ID NO: 47997 - DNA, 26 bp, Homo Sapiens
gaggcttacgaccccttatttacccc

SEQ ID NO: 47998 - DNA, 31 bp, Homo Sapiens; identical to SEQ ID NO: 15682

SEQ ID NO: 47999 - DNA, 32 bp, Homo Sapiens; identical to SEQ ID NO: 15683

SEQ ID NO: 48000 - DNA, 33 bp, Homo Sapiens; identical to SEQ ID NO: 15684

SEQ ID NO: 48001 - DNA, 34 bp, Homo Sapiens; identical to SEQ ID NO: 15685

SEQ ID NO: 48002 - DNA, 27 bp, Homo Sapiens
gagggttcgagtcccttcgtggtcgcc

SEQ ID NO: 48003 - DNA, 19 bp, Homo Sapiens
gaggtcgatggatcgaaac

SEQ ID NO: 48004 - DNA, 20 bp, Homo Sapiens
gaggtcgatggatcgaaacc

SEQ ID NO: 48005 - DNA, 20 bp, Homo Sapiens
gaggttgtgagttcgagcct

SEQ ID NO: 48006 - DNA, 18 bp, Homo Sapiens
gagtcccggcggagtcgc

SEQ ID NO: 48007 - DNA, 20 bp, Homo Sapiens
gagtctcggtggaacctcca

SEQ ID NO: 48008 - DNA, 16 bp, Homo Sapiens
gagtgaagcattggac

SEQ ID NO: 48009 - DNA, 17 bp, Homo Sapiens
gagtgaagcattggact

SEQ ID NO: 48010 - DNA, 19 bp, Homo Sapiens
gagtgaagcattggactgt

SEQ ID NO: 48011 - DNA, 20 bp, Homo Sapiens
gagtgaagcattggactgta

SEQ ID NO: 48012 - DNA, 24 bp, Homo Sapiens
gagtgaagcattggactgtaaatc

SEQ ID NO: 48013 - DNA, 43 bp, Homo Sapiens; identical to SEQ ID NO: 15764

SEQ ID NO: 48014 - DNA, 45 bp, Homo Sapiens; identical to SEQ ID NO: 15766

SEQ ID NO: 48015 - DNA, 26 bp, Homo Sapiens
gagtggcgcagcggaagcgtgctggg

SEQ ID NO: 48016 - DNA, 27 bp, Homo Sapiens
gagtggcgcagcggaagcgtgctgggc

SEQ ID NO: 48017 - DNA, 29 bp, Homo Sapiens
gagtggcgcagcggaagcgtgctgggccc

SEQ ID NO: 48018 - DNA, 35 bp, Homo Sapiens; identical to SEQ ID NO: 15776

SEQ ID NO: 48019 - DNA, 18 bp, Homo Sapiens
gagtggggttttgcagtc

SEQ ID NO: 48020 - DNA, 24 bp, Homo Sapiens
gagtggggttttgcagtccttacc

SEQ ID NO: 48021 - DNA, 20 bp, Homo Sapiens
gagtggttaaggcattggac

SEQ ID NO: 48022 - DNA, 24 bp, Homo Sapiens
gagttaaagactttttctctgacc

SEQ ID NO: 48023 - DNA, 25 bp, Homo Sapiens
gagttaaagactttttctctgacca

SEQ ID NO: 48024 - DNA, 24 bp, Homo Sapiens
gagttcaaatctcgctggggcctc

SEQ ID NO: 48025 - DNA, 23 bp, Homo Sapiens
gagttcaaatctcggtggaacct

SEQ ID NO: 48026 - DNA, 24 bp, Homo Sapiens
gagttcaaatctcggtggaacctc

SEQ ID NO: 48027 - DNA, 26 bp, Homo Sapiens
gagttcaaatctcggtggaacctcca

SEQ ID NO: 48028 - DNA, 23 bp, Homo Sapiens
gagttcaaatctcggtgggacct

SEQ ID NO: 48029 - DNA, 24 bp, Homo Sapiens
gagttcaaatctcggtgggacctc

SEQ ID NO: 48030 - DNA, 39 bp, Homo Sapiens; identical to SEQ ID NO: 15835

SEQ ID NO: 48031 - DNA, 46 bp, Homo Sapiens; identical to SEQ ID NO: 37037

SEQ ID NO: 48032 - DNA, 16 bp, Homo Sapiens
gataacgcgtctgact

SEQ ID NO: 48033 - DNA, 17 bp, Homo Sapiens
gatagctcagtcggtag

SEQ ID NO: 48034 - DNA, 18 bp, Homo Sapiens
gatagctcagtcggtaga

SEQ ID NO: 48035 - DNA, 19 bp, Homo Sapiens
gatagctcagtcggtagag

SEQ ID NO: 48036 - DNA, 22 bp, Homo Sapiens
gatagctcagtcggtagagcat

SEQ ID NO: 48037 - DNA, 27 bp, Homo Sapiens
gatagctcagtcggtagagcatcagac

SEQ ID NO: 48038 - DNA, 18 bp, Homo Sapiens
gataggtggcacggagaa

SEQ ID NO: 48039 - DNA, 38 bp, Homo Sapiens; identical to SEQ ID NO: 15923

SEQ ID NO: 48040 - DNA, 39 bp, Homo Sapiens; identical to SEQ ID NO: 15924

SEQ ID NO: 48041 - DNA, 20 bp, Homo Sapiens
gatcagaaggctgcgtgttc

SEQ ID NO: 48042 - DNA, 32 bp, Homo Sapiens
gatcagaaggctgcgtgttcgaatcacgtcgg

SEQ ID NO: 48043 - DNA, 36 bp, Homo Sapiens; identical to SEQ ID NO: 15935

SEQ ID NO: 48044 - DNA, 37 bp, Homo Sapiens
gatcagaaggctgcgtgttcgaatcacgtcggggtca

SEQ ID NO: 48045 - DNA, 38 bp, Homo Sapiens; identical to SEQ ID NO: 15936

SEQ ID NO: 48046 - DNA, 39 bp, Homo Sapiens; identical to SEQ ID NO: 15937

SEQ ID NO: 48047 - DNA, 36 bp, Homo Sapiens; identical to SEQ ID NO: 15942

SEQ ID NO: 48048 - DNA, 36 bp, Homo Sapiens; identical to SEQ ID NO: 15949

SEQ ID NO: 48049 - DNA, 39 bp, Homo Sapiens; identical to SEQ ID NO: 15952

SEQ ID NO: 48050 - DNA, 19 bp, Homo Sapiens
gatccccggcatctccacc

SEQ ID NO: 48051 - DNA, 20 bp, Homo Sapiens
gatccccggcatctccacca

SEQ ID NO: 48052 - DNA, 17 bp, Homo Sapiens
gatccccgtacgggcca

SEQ ID NO: 48053 - DNA, 19 bp, Homo Sapiens
gatccccgtacgggccacc

SEQ ID NO: 48054 - DNA, 20 bp, Homo Sapiens
gatccccgtacgggccacca

SEQ ID NO: 48055 - DNA, 19 bp, Homo Sapiens
gatcccgggcggaaacacc

SEQ ID NO: 48056 - DNA, 18 bp, Homo Sapiens
gatcccgggtttcggcac

SEQ ID NO: 48057 - DNA, 19 bp, Homo Sapiens
gatcccgggtttcggcacc

SEQ ID NO: 48058 - DNA, 20 bp, Homo Sapiens
gatcccgggtttcggcacca

SEQ ID NO: 48059 - DNA, 26 bp, Homo Sapiens
gatccgagttcaaatctcggtgggac

SEQ ID NO: 48060 - DNA, 29 bp, Homo Sapiens
gatccgagttcaaatctcggtgggacctc

SEQ ID NO: 48061 - DNA, 19 bp, Homo Sapiens
gatcctcacctggagcacc

SEQ ID NO: 48062 - DNA, 31 bp, Homo Sapiens; identical to SEQ ID NO: 15971

SEQ ID NO: 48063 - DNA, 23 bp, Homo Sapiens
gatcgaaaccatcctctgctacc

SEQ ID NO: 48064 - DNA, 24 bp, Homo Sapiens
gatcgaaaccatcctctgctacca

SEQ ID NO: 48065 - DNA, 28 bp, Homo Sapiens
gatcgtatagtggttagtactctgcgtt

SEQ ID NO: 48066 - DNA, 22 bp, Homo Sapiens
gatgaaaacctttttccaagga

SEQ ID NO: 48067 - DNA, 23 bp, Homo Sapiens
gatgaaaacctttttccaaggac

SEQ ID NO: 48068 - DNA, 24 bp, Homo Sapiens
gatgaaaacctttttccaaggaca

SEQ ID NO: 48069 - DNA, 25 bp, Homo Sapiens
gatgaaaacctttttccaaggacac

SEQ ID NO: 48070 - DNA, 26 bp, Homo Sapiens
gatgaaaacctttttccaaggacacc

SEQ ID NO: 48071 - DNA, 27 bp, Homo Sapiens
gatgaaaacctttttccaaggacacca

SEQ ID NO: 48072 - DNA, 16 bp, Homo Sapiens
gatggccgagcggtct

SEQ ID NO: 48073 - DNA, 19 bp, Homo Sapiens
gatggccgagcggtctaag

SEQ ID NO: 48074 - DNA, 21 bp, Homo Sapiens
gatggccgagcggtctaaggc

SEQ ID NO: 48075 - DNA, 33 bp, Homo Sapiens; identical to SEQ ID NO: 16040

SEQ ID NO: 48076 - DNA, 26 bp, Homo Sapiens
gatgggttcgattctcatagtcctag

SEQ ID NO: 48077 - DNA, 31 bp, Homo Sapiens; identical to SEQ ID NO: 16054

SEQ ID NO: 48078 - DNA, 32 bp, Homo Sapiens; identical to SEQ ID NO: 16055

SEQ ID NO: 48079 - DNA, 35 bp, Homo Sapiens; identical to SEQ ID NO: 16058

SEQ ID NO: 48080 - DNA, 40 bp, Homo Sapiens; identical to SEQ ID NO: 16063

SEQ ID NO: 48081 - DNA, 43 bp, Homo Sapiens; identical to SEQ ID NO: 16066

SEQ ID NO: 48082 - DNA, 44 bp, Homo Sapiens; identical to SEQ ID NO: 16067

SEQ ID NO: 48083 - DNA, 45 bp, Homo Sapiens; identical to SEQ ID NO: 16068

SEQ ID NO: 48084 - DNA, 46 bp, Homo Sapiens; identical to SEQ ID NO: 16069

SEQ ID NO: 48085 - DNA, 47 bp, Homo Sapiens; identical to SEQ ID NO: 16070

SEQ ID NO: 48086 - DNA, 32 bp, Homo Sapiens; identical to SEQ ID NO: 16090

SEQ ID NO: 48087 - DNA, 21 bp, Homo Sapiens
gattcccattcttgcgacccg

SEQ ID NO: 48088 - DNA, 22 bp, Homo Sapiens
gattcccattcttgcgacccgg

SEQ ID NO: 48089 - DNA, 24 bp, Homo Sapiens
gattcccattcttgcgacccgggt

SEQ ID NO: 48090 - DNA, 45 bp, Homo Sapiens; identical to SEQ ID NO: 16116

SEQ ID NO: 48091 - DNA, 17 bp, Homo Sapiens
gattccccgacggggag

SEQ ID NO: 48092 - DNA, 18 bp, Homo Sapiens
gattccccgacggggagc

SEQ ID NO: 48093 - DNA, 19 bp, Homo Sapiens
gattccccgacggggagcc

SEQ ID NO: 48094 - DNA, 20 bp, Homo Sapiens
gattccccgacggggagcca

SEQ ID NO: 48095 - DNA, 19 bp, Homo Sapiens
gattcccggccaacgcacc

SEQ ID NO: 48096 - DNA, 20 bp, Homo Sapiens
gattcccggccaacgcacca

SEQ ID NO: 48097 - DNA, 18 bp, Homo Sapiens
gattcccggccaatgcac

SEQ ID NO: 48098 - DNA, 19 bp, Homo Sapiens
gattcccggccaatgcacc

SEQ ID NO: 48099 - DNA, 20 bp, Homo Sapiens
gattcccggccaatgcacca

SEQ ID NO: 48100 - DNA, 20 bp, Homo Sapiens
gattcccggcccatgcacca

SEQ ID NO: 48101 - DNA, 16 bp, Homo Sapiens
gattcccgggcggcgc

SEQ ID NO: 48102 - DNA, 18 bp, Homo Sapiens
gattcccgggcggcgcac

SEQ ID NO: 48103 - DNA, 19 bp, Homo Sapiens
gattcccgggcggcgcacc

SEQ ID NO: 48104 - DNA, 16 bp, Homo Sapiens
gattcccggtcaggga

SEQ ID NO: 48105 - DNA, 17 bp, Homo Sapiens
gattcccggtcagggaa

SEQ ID NO: 48106 - DNA, 18 bp, Homo Sapiens
gattcccggtcagggaac

SEQ ID NO: 48107 - DNA, 19 bp, Homo Sapiens
gattcccggtcagggaacc

SEQ ID NO: 48108 - DNA, 18 bp, Homo Sapiens
gattccggctcgaaggac

SEQ ID NO: 48109 - DNA, 19 bp, Homo Sapiens
gattccggctcgaaggacc

SEQ ID NO: 48110 - DNA, 20 bp, Homo Sapiens
gattccggctcgaaggacca

SEQ ID NO: 48111 - DNA, 17 bp, Homo Sapiens
gattcggcgctctcacc

SEQ ID NO: 48112 - DNA, 20 bp, Homo Sapiens
gattcggcgctctcaccgcc

SEQ ID NO: 48113 - DNA, 27 bp, Homo Sapiens
gattcggcgctctcaccgccgcggccc

SEQ ID NO: 48114 - DNA, 28 bp, Homo Sapiens
gattcggcgctctcaccgccgcggcccg

SEQ ID NO: 48115 - DNA, 29 bp, Homo Sapiens
gattctaggttcgactcctggctggctcg

SEQ ID NO: 48116 - DNA, 31 bp, Homo Sapiens; identical to SEQ ID NO: 16171

SEQ ID NO: 48117 - DNA, 18 bp, Homo Sapiens
gattctcatagtcctagc

SEQ ID NO: 48118 - DNA, 30 bp, Homo Sapiens; identical to SEQ ID NO: 16191

SEQ ID NO: 48119 - DNA, 31 bp, Homo Sapiens; identical to SEQ ID NO: 16192

SEQ ID NO: 48120 - DNA, 32 bp, Homo Sapiens; identical to SEQ ID NO: 16193

SEQ ID NO: 48121 - DNA, 20 bp, Homo Sapiens
gattgcaggttcgagtcctg

SEQ ID NO: 48122 - DNA, 30 bp, Homo Sapiens; identical to SEQ ID NO: 16195

SEQ ID NO: 48123 - DNA, 31 bp, Homo Sapiens; identical to SEQ ID NO: 16196

SEQ ID NO: 48124 - DNA, 32 bp, Homo Sapiens; identical to SEQ ID NO: 16197

SEQ ID NO: 48125 - DNA, 33 bp, Homo Sapiens; identical to SEQ ID NO: 16215

SEQ ID NO: 48126 - DNA, 34 bp, Homo Sapiens; identical to SEQ ID NO: 16216

SEQ ID NO: 48127 - DNA, 35 bp, Homo Sapiens; identical to SEQ ID NO: 16217

SEQ ID NO: 48128 - DNA, 43 bp, Homo Sapiens; identical to SEQ ID NO: 16225

SEQ ID NO: 48129 - DNA, 44 bp, Homo Sapiens; identical to SEQ ID NO: 16226

SEQ ID NO: 48130 - DNA, 45 bp, Homo Sapiens; identical to SEQ ID NO: 16227

SEQ ID NO: 48131 - DNA, 46 bp, Homo Sapiens; identical to SEQ ID NO: 16228

SEQ ID NO: 48132 - DNA, 29 bp, Homo Sapiens
gattgtgggttcgagtcccatctgggtcg

SEQ ID NO: 48133 - DNA, 30 bp, Homo Sapiens; identical to SEQ ID NO: 16237

SEQ ID NO: 48134 - DNA, 31 bp, Homo Sapiens; identical to SEQ ID NO: 16238

SEQ ID NO: 48135 - DNA, 17 bp, Homo Sapiens
gatttcaacttaacttg

SEQ ID NO: 48136 - DNA, 24 bp, Homo Sapiens
gatttcaacttaacttgaccgctc

SEQ ID NO: 48137 - DNA, 26 bp, Homo Sapiens
gatttcaacttaacttgaccgctctg

SEQ ID NO: 48138 - DNA, 27 bp, Homo Sapiens
gatttcaacttaacttgaccgctctga

SEQ ID NO: 48139 - DNA, 28 bp, Homo Sapiens
gatttcaacttaacttgaccgctctgac

SEQ ID NO: 48140 - DNA, 29 bp, Homo Sapiens
gatttcaacttaacttgaccgctctgacc

SEQ ID NO: 48141 - DNA, 30 bp, Homo Sapiens; identical to SEQ ID NO: 16253

SEQ ID NO: 48142 - DNA, 35 bp, Homo Sapiens
gcaaattcgaagaagcagcttcaaacctgccgggg

SEQ ID NO: 48143 - DNA, 36 bp, Homo Sapiens; identical to SEQ ID NO: 16289

SEQ ID NO: 48144 - DNA, 37 bp, Homo Sapiens; identical to SEQ ID NO: 16290

SEQ ID NO: 48145 - DNA, 38 bp, Homo Sapiens; identical to SEQ ID NO: 16291

SEQ ID NO: 48146 - DNA, 29 bp, Homo Sapiens
gcaacctcggttcgaatccgagtcacggc

SEQ ID NO: 48147 - DNA, 33 bp, Homo Sapiens; identical to SEQ ID NO: 16314

SEQ ID NO: 48148 - DNA, 41 bp, Homo Sapiens; identical to SEQ ID NO: 16317

SEQ ID NO: 48149 - DNA, 22 bp, Homo Sapiens
gcaatggataacgcgtctgact

SEQ ID NO: 48150 - DNA, 18 bp, Homo Sapiens
gcaatggatagcgcattg

SEQ ID NO: 48151 - DNA, 19 bp, Homo Sapiens
gcaatggatagcgcattgg

SEQ ID NO: 48152 - DNA, 20 bp, Homo Sapiens
gcaatggatagcgcattgga

SEQ ID NO: 48153 - DNA, 21 bp, Homo Sapiens
gcaatggatagcgcattggac

SEQ ID NO: 48154 - DNA, 22 bp, Homo Sapiens
gcaatggatagcgcattggact

SEQ ID NO: 48155 - DNA, 24 bp, Homo Sapiens
gcaatggatagcgcattggacttc

SEQ ID NO: 48156 - DNA, 42 bp, Homo Sapiens
gcaatggatagcgcattggacttctaattcaaaggttccggg

SEQ ID NO: 48157 - DNA, 44 bp, Homo Sapiens; identical to SEQ ID NO: 37202

SEQ ID NO: 48158 - DNA, 18 bp, Homo Sapiens
gcaatggtggttcagtgg

SEQ ID NO: 48159 - DNA, 29 bp, Homo Sapiens
gcaatggtggttcagtggtagaattctcg

SEQ ID NO: 48160 - DNA, 30 bp, Homo Sapiens; identical to SEQ ID NO: 16339

SEQ ID NO: 48161 - DNA, 31 bp, Homo Sapiens; identical to SEQ ID NO: 16340

SEQ ID NO: 48162 - DNA, 32 bp, Homo Sapiens; identical to SEQ ID NO: 16341

SEQ ID NO: 48163 - DNA, 32 bp, Homo Sapiens; identical to SEQ ID NO: 16354

SEQ ID NO: 48164 - DNA, 34 bp, Homo Sapiens; identical to SEQ ID NO: 37214

SEQ ID NO: 48165 - DNA, 35 bp, Homo Sapiens; identical to SEQ ID NO: 37215

SEQ ID NO: 48166 - DNA, 36 bp, Homo Sapiens; identical to SEQ ID NO: 16356

SEQ ID NO: 48167 - DNA, 37 bp, Homo Sapiens; identical to SEQ ID NO: 16357

SEQ ID NO: 48168 - DNA, 38 bp, Homo Sapiens; identical to SEQ ID NO: 16358

SEQ ID NO: 48169 - DNA, 36 bp, Homo Sapiens
gcacgaggtcctgggttcgatccccagtacctccac

SEQ ID NO: 48170 - DNA, 33 bp, Homo Sapiens; identical to SEQ ID NO: 16361

SEQ ID NO: 48171 - DNA, 16 bp, Homo Sapiens
gcactctggactctga

SEQ ID NO: 48172 - DNA, 17 bp, Homo Sapiens
gcactctggactctgaa

SEQ ID NO: 48173 - DNA, 18 bp, Homo Sapiens
gcactctggactctgaat

SEQ ID NO: 48174 - DNA, 19 bp, Homo Sapiens
gcactctggactctgaatc

SEQ ID NO: 48175 - DNA, 20 bp, Homo Sapiens
gcactctggactctgaatcc

SEQ ID NO: 48176 - DNA, 21 bp, Homo Sapiens
gcactctggactctgaatcca

SEQ ID NO: 48177 - DNA, 22 bp, Homo Sapiens
gcactctggactctgaatccag

SEQ ID NO: 48178 - DNA, 23 bp, Homo Sapiens
gcactctggactctgaatccagc

SEQ ID NO: 48179 - DNA, 24 bp, Homo Sapiens
gcactctggactctgaatccagcg

SEQ ID NO: 48180 - DNA, 30 bp, Homo Sapiens; identical to SEQ ID NO: 16375

SEQ ID NO: 48181 - DNA, 31 bp, Homo Sapiens; identical to SEQ ID NO: 16376

SEQ ID NO: 48182 - DNA, 32 bp, Homo Sapiens; identical to SEQ ID NO: 16377

SEQ ID NO: 48183 - DNA, 33 bp, Homo Sapiens; identical to SEQ ID NO: 16378

SEQ ID NO: 48184 - DNA, 34 bp, Homo Sapiens; identical to SEQ ID NO: 16379

SEQ ID NO: 48185 - DNA, 35 bp, Homo Sapiens; identical to SEQ ID NO: 16380

SEQ ID NO: 48186 - DNA, 43 bp, Homo Sapiens; identical to SEQ ID NO: 37240

SEQ ID NO: 48187 - DNA, 17 bp, Homo Sapiens
gcactctggactttgaa

SEQ ID NO: 48188 - DNA, 19 bp, Homo Sapiens
gcactctggactttgaatc

SEQ ID NO: 48189 - DNA, 20 bp, Homo Sapiens
gcactctggactttgaatcc

SEQ ID NO: 48190 - DNA, 18 bp, Homo Sapiens
gcactggtggttcagtgg

SEQ ID NO: 48191 - DNA, 29 bp, Homo Sapiens
gcactggtggttcagtggtagaattctcg

SEQ ID NO: 48192 - DNA, 30 bp, Homo Sapiens; identical to SEQ ID NO: 16401

SEQ ID NO: 48193 - DNA, 31 bp, Homo Sapiens; identical to SEQ ID NO: 16402

SEQ ID NO: 48194 - DNA, 32 bp, Homo Sapiens; identical to SEQ ID NO: 16403

SEQ ID NO: 48195 - DNA, 27 bp, Homo Sapiens
gcagaaggtcctgggttcgagccccag

SEQ ID NO: 48196 - DNA, 33 bp, Homo Sapiens; identical to SEQ ID NO: 16414

SEQ ID NO: 48197 - DNA, 34 bp, Homo Sapiens; identical to SEQ ID NO: 16415

SEQ ID NO: 48198 - DNA, 35 bp, Homo Sapiens; identical to SEQ ID NO: 16416

SEQ ID NO: 48199 - DNA, 36 bp, Homo Sapiens; identical to SEQ ID NO: 16417

SEQ ID NO: 48200 - DNA, 37 bp, Homo Sapiens; identical to SEQ ID NO: 16418

SEQ ID NO: 48201 - DNA, 38 bp, Homo Sapiens; identical to SEQ ID NO: 16419

SEQ ID NO: 48202 - DNA, 18 bp, Homo Sapiens
gcagagtggcgcagcgga

SEQ ID NO: 48203 - DNA, 27 bp, Homo Sapiens
gcagagtggcgcagcggaagcgtgctg

SEQ ID NO: 48204 - DNA, 30 bp, Homo Sapiens; identical to SEQ ID NO: 16440

SEQ ID NO: 48205 - DNA, 32 bp, Homo Sapiens; identical to SEQ ID NO: 16461

SEQ ID NO: 48206 - DNA, 35 bp, Homo Sapiens; identical to SEQ ID NO: 16464

SEQ ID NO: 48207 - DNA, 36 bp, Homo Sapiens; identical to SEQ ID NO: 16465

SEQ ID NO: 48208 - DNA, 16 bp, Homo Sapiens
gcagcgatggccgagt

SEQ ID NO: 48209 - DNA, 18 bp, Homo Sapiens
gcagcgatggccgagtgg

SEQ ID NO: 48210 - DNA, 19 bp, Homo Sapiens
gcagcgatggccgagtggt

SEQ ID NO: 48211 - DNA, 21 bp, Homo Sapiens
gcagcgatggccgagtggtta

SEQ ID NO: 48212 - DNA, 24 bp, Homo Sapiens
gcagcgatggccgagtggttaagg

SEQ ID NO: 48213 - DNA, 25 bp, Homo Sapiens
gcagcgatggccgagtggttaaggc

SEQ ID NO: 48214 - DNA, 19 bp, Homo Sapiens
gcagcggaagcgtgctggg

SEQ ID NO: 48215 - DNA, 20 bp, Homo Sapiens
gcagcggaagcgtgctgggc

SEQ ID NO: 48216 - DNA, 21 bp, Homo Sapiens
gcagcggaagcgtgctgggcc

SEQ ID NO: 48217 - DNA, 22 bp, Homo Sapiens
gcagcggaagcgtgctgggccc

SEQ ID NO: 48218 - DNA, 19 bp, Homo Sapiens
gcagtggtagaattctcgc

SEQ ID NO: 48219 - DNA, 20 bp, Homo Sapiens
gcagtggtagaattctcgcc

SEQ ID NO: 48220 - DNA, 21 bp, Homo Sapiens
gcagtggtagaattctcgcct

SEQ ID NO: 48221 - DNA, 18 bp, Homo Sapiens
gcataggtggttcagtgg

SEQ ID NO: 48222 - DNA, 27 bp, Homo Sapiens
gcatcagcctccggagctggggattgt

SEQ ID NO: 48223 - DNA, 18 bp, Homo Sapiens
gcatgagactcttaatct

SEQ ID NO: 48224 - DNA, 33 bp, Homo Sapiens
gcatgagactcttaatctcagggtcgtgggttc

SEQ ID NO: 48225 - DNA, 16 bp, Homo Sapiens
gcatgaggtcccgggt

SEQ ID NO: 48226 - DNA, 37 bp, Homo Sapiens; identical to SEQ ID NO: 16534

SEQ ID NO: 48227 - DNA, 17 bp, Homo Sapiens
gcatgggactcttaatc

SEQ ID NO: 48228 - DNA, 18 bp, Homo Sapiens
gcatgggactcttaatcc

SEQ ID NO: 48229 - DNA, 18 bp, Homo Sapiens
gcatgggtgattcagtgg

SEQ ID NO: 48230 - DNA, 16 bp, Homo Sapiens
gcatgggtggttcagt

SEQ ID NO: 48231 - DNA, 17 bp, Homo Sapiens
gcatgggtggttcagtg

SEQ ID NO: 48232 - DNA, 18 bp, Homo Sapiens
gcatgggtggttcagtgg

SEQ ID NO: 48233 - DNA, 19 bp, Homo Sapiens
gcatgggtggttcagtggt

SEQ ID NO: 48234 - DNA, 20 bp, Homo Sapiens
gcatgggtggttcagtggta

SEQ ID NO: 48235 - DNA, 21 bp, Homo Sapiens
gcatgggtggttcagtggtag

SEQ ID NO: 48236 - DNA, 22 bp, Homo Sapiens
gcatgggtggttcagtggtaga

SEQ ID NO: 48237 - DNA, 23 bp, Homo Sapiens
gcatgggtggttcagtggtagaa

SEQ ID NO: 48238 - DNA, 24 bp, Homo Sapiens
gcatgggtggttcagtggtagaat

SEQ ID NO: 48239 - DNA, 25 bp, Homo Sapiens
gcatgggtggttcagtggtagaatt

SEQ ID NO: 48240 - DNA, 26 bp, Homo Sapiens
gcatgggtggttcagtggtagaattc

SEQ ID NO: 48241 - DNA, 27 bp, Homo Sapiens
gcatgggtggttcagtggtagaattct

SEQ ID NO: 48242 - DNA, 28 bp, Homo Sapiens
gcatgggtggttcagtggtagaattctc

SEQ ID NO: 48243 - DNA, 29 bp, Homo Sapiens
gcatgggtggttcagtggtagaattctcg

SEQ ID NO: 48244 - DNA, 30 bp, Homo Sapiens; identical to SEQ ID NO: 16559

SEQ ID NO: 48245 - DNA, 31 bp, Homo Sapiens; identical to SEQ ID NO: 16560

SEQ ID NO: 48246 - DNA, 32 bp, Homo Sapiens; identical to SEQ ID NO: 16561

SEQ ID NO: 48247 - DNA, 33 bp, Homo Sapiens; identical to SEQ ID NO: 16562

SEQ ID NO: 48248 - DNA, 34 bp, Homo Sapiens; identical to SEQ ID NO: 16563

SEQ ID NO: 48249 - DNA, 35 bp, Homo Sapiens; identical to SEQ ID NO: 16564

SEQ ID NO: 48250 - DNA, 36 bp, Homo Sapiens; identical to SEQ ID NO: 16565

SEQ ID NO: 48251 - DNA, 37 bp, Homo Sapiens; identical to SEQ ID NO: 16566

SEQ ID NO: 48252 - DNA, 38 bp, Homo Sapiens; identical to SEQ ID NO: 16567

SEQ ID NO: 48253 - DNA, 40 bp, Homo Sapiens; identical to SEQ ID NO: 16569

SEQ ID NO: 48254 - DNA, 43 bp, Homo Sapiens; identical to SEQ ID NO: 16572

SEQ ID NO: 48255 - DNA, 36 bp, Homo Sapiens; identical to SEQ ID NO: 16599

SEQ ID NO: 48256 - DNA, 18 bp, Homo Sapiens
gcattggtggttcaatgg

SEQ ID NO: 48257 - DNA, 29 bp, Homo Sapiens
gcattggtggttcaatggtagaattctcg

SEQ ID NO: 48258 - DNA, 30 bp, Homo Sapiens; identical to SEQ ID NO: 16612

SEQ ID NO: 48259 - DNA, 31 bp, Homo Sapiens; identical to SEQ ID NO: 16613

SEQ ID NO: 48260 - DNA, 32 bp, Homo Sapiens; identical to SEQ ID NO: 16614

SEQ ID NO: 48261 - DNA, 16 bp, Homo Sapiens
gcattggtggttcagt

SEQ ID NO: 48262 - DNA, 17 bp, Homo Sapiens
gcattggtggttcagtg

SEQ ID NO: 48263 - DNA, 18 bp, Homo Sapiens
gcattggtggttcagtgg

SEQ ID NO: 48264 - DNA, 19 bp, Homo Sapiens
gcattggtggttcagtggt

SEQ ID NO: 48265 - DNA, 20 bp, Homo Sapiens
gcattggtggttcagtggta

SEQ ID NO: 48266 - DNA, 21 bp, Homo Sapiens
gcattggtggttcagtggtag

SEQ ID NO: 48267 - DNA, 22 bp, Homo Sapiens
gcattggtggttcagtggtaga

SEQ ID NO: 48268 - DNA, 23 bp, Homo Sapiens
gcattggtggttcagtggtagaa

SEQ ID NO: 48269 - DNA, 24 bp, Homo Sapiens
gcattggtggttcagtggtagaat

SEQ ID NO: 48270 - DNA, 25 bp, Homo Sapiens
gcattggtggttcagtggtagaatt

SEQ ID NO: 48271 - DNA, 26 bp, Homo Sapiens
gcattggtggttcagtggtagaattc

SEQ ID NO: 48272 - DNA, 27 bp, Homo Sapiens
gcattggtggttcagtggtagaattct

SEQ ID NO: 48273 - DNA, 28 bp, Homo Sapiens
gcattggtggttcagtggtagaattctc

SEQ ID NO: 48274 - DNA, 29 bp, Homo Sapiens
gcattggtggttcagtggtagaattctcg

SEQ ID NO: 48275 - DNA, 30 bp, Homo Sapiens; identical to SEQ ID NO: 16630

SEQ ID NO: 48276 - DNA, 31 bp, Homo Sapiens; identical to SEQ ID NO: 16631

SEQ ID NO: 48277 - DNA, 32 bp, Homo Sapiens; identical to SEQ ID NO: 16632

SEQ ID NO: 48278 - DNA, 33 bp, Homo Sapiens; identical to SEQ ID NO: 16633

SEQ ID NO: 48279 - DNA, 34 bp, Homo Sapiens; identical to SEQ ID NO: 16634

SEQ ID NO: 48280 - DNA, 35 bp, Homo Sapiens; identical to SEQ ID NO: 16635

SEQ ID NO: 48281 - DNA, 36 bp, Homo Sapiens; identical to SEQ ID NO: 16636

SEQ ID NO: 48282 - DNA, 37 bp, Homo Sapiens; identical to SEQ ID NO: 16637

SEQ ID NO: 48283 - DNA, 38 bp, Homo Sapiens; identical to SEQ ID NO: 16638

SEQ ID NO: 48284 - DNA, 33 bp, Homo Sapiens; identical to SEQ ID NO: 16640

SEQ ID NO: 48285 - DNA, 34 bp, Homo Sapiens; identical to SEQ ID NO: 16641

SEQ ID NO: 48286 - DNA, 35 bp, Homo Sapiens; identical to SEQ ID NO: 16642

SEQ ID NO: 48287 - DNA, 36 bp, Homo Sapiens; identical to SEQ ID NO: 16643

SEQ ID NO: 48288 - DNA, 37 bp, Homo Sapiens; identical to SEQ ID NO: 16644

SEQ ID NO: 48289 - DNA, 38 bp, Homo Sapiens; identical to SEQ ID NO: 16645

SEQ ID NO: 48290 - DNA, 39 bp, Homo Sapiens; identical to SEQ ID NO: 16646

SEQ ID NO: 48291 - DNA, 40 bp, Homo Sapiens; identical to SEQ ID NO: 16647

SEQ ID NO: 48292 - DNA, 41 bp, Homo Sapiens; identical to SEQ ID NO: 16648

SEQ ID NO: 48293 - DNA, 42 bp, Homo Sapiens; identical to SEQ ID NO: 16649

SEQ ID NO: 48294 - DNA, 43 bp, Homo Sapiens; identical to SEQ ID NO: 16650

SEQ ID NO: 48295 - DNA, 44 bp, Homo Sapiens; identical to SEQ ID NO: 16651

SEQ ID NO: 48296 - DNA, 45 bp, Homo Sapiens; identical to SEQ ID NO: 16652

SEQ ID NO: 48297 - DNA, 46 bp, Homo Sapiens; identical to SEQ ID NO: 16653

SEQ ID NO: 48298 - DNA, 47 bp, Homo Sapiens; identical to SEQ ID NO: 16654

SEQ ID NO: 48299 - DNA, 31 bp, Homo Sapiens; identical to SEQ ID NO: 37386

SEQ ID NO: 48300 - DNA, 32 bp, Homo Sapiens; identical to SEQ ID NO: 16664

SEQ ID NO: 48301 - DNA, 36 bp, Homo Sapiens; identical to SEQ ID NO: 16666

SEQ ID NO: 48302 - DNA, 36 bp, Homo Sapiens; identical to SEQ ID NO: 16668

SEQ ID NO: 48303 - DNA, 16 bp, Homo Sapiens
gccacgcgggaggccc

SEQ ID NO: 48304 - DNA, 17 bp, Homo Sapiens
gccacgcgggaggcccg

SEQ ID NO: 48305 - DNA, 18 bp, Homo Sapiens
gccacgcgggaggcccgg

SEQ ID NO: 48306 - DNA, 19 bp, Homo Sapiens
gccacgcgggaggcccggg

SEQ ID NO: 48307 - DNA, 20 bp, Homo Sapiens
gccacgcgggaggcccgggt

SEQ ID NO: 48308 - DNA, 21 bp, Homo Sapiens
gccacgcgggaggcccgggtt

SEQ ID NO: 48309 - DNA, 41 bp, Homo Sapiens; identical to SEQ ID NO: 16680

SEQ ID NO: 48310 - DNA, 42 bp, Homo Sapiens; identical to SEQ ID NO: 16681

SEQ ID NO: 48311 - DNA, 18 bp, Homo Sapiens
gccagggattgtgggttc

SEQ ID NO: 48312 - DNA, 19 bp, Homo Sapiens
gccagggattgtgggttcg

SEQ ID NO: 48313 - DNA, 35 bp, Homo Sapiens; identical to SEQ ID NO: 16687

SEQ ID NO: 48314 - DNA, 37 bp, Homo Sapiens; identical to SEQ ID NO: 16693

SEQ ID NO: 48315 - DNA, 38 bp, Homo Sapiens; identical to SEQ ID NO: 16694

SEQ ID NO: 48316 - DNA, 36 bp, Homo Sapiens; identical to SEQ ID NO: 16700

SEQ ID NO: 48317 - DNA, 37 bp, Homo Sapiens; identical to SEQ ID NO: 16701

SEQ ID NO: 48318 - DNA, 38 bp, Homo Sapiens; identical to SEQ ID NO: 16702

SEQ ID NO: 48319 - DNA, 31 bp, Homo Sapiens; identical to SEQ ID NO: 16710

SEQ ID NO: 48320 - DNA, 16 bp, Homo Sapiens
gcccacccagggacgc

SEQ ID NO: 48321 - DNA, 17 bp, Homo Sapiens
gcccacccagggacgcc

SEQ ID NO: 48322 - DNA, 18 bp, Homo Sapiens
gcccacccagggacgcca

SEQ ID NO: 48323 - DNA, 33 bp, Homo Sapiens; identical to SEQ ID NO: 16716

SEQ ID NO: 48324 - DNA, 22 bp, Homo Sapiens
gcccataccccgaaaatgttgg

SEQ ID NO: 48325 - DNA, 17 bp, Homo Sapiens
gcccatccagggacgcc

SEQ ID NO: 48326 - DNA, 16 bp, Homo Sapiens
gccccacgttgggcgc

SEQ ID NO: 48327 - DNA, 17 bp, Homo Sapiens
gccccacgttgggcgcc

SEQ ID NO: 48328 - DNA, 16 bp, Homo Sapiens
gccccagtggaaccac

SEQ ID NO: 48329 - DNA, 17 bp, Homo Sapiens
gccccagtggaaccacc

SEQ ID NO: 48330 - DNA, 18 bp, Homo Sapiens
gccccagtggaaccacca

SEQ ID NO: 48331 - DNA, 18 bp, Homo Sapiens
gccccagtggcctaatgg

SEQ ID NO: 48332 - DNA, 19 bp, Homo Sapiens
gccccagtggcctaatgga

SEQ ID NO: 48333 - DNA, 27 bp, Homo Sapiens
gccccagtggcctaatggataaggcac

SEQ ID NO: 48334 - DNA, 33 bp, Homo Sapiens; identical to SEQ ID NO: 37420

SEQ ID NO: 48335 - DNA, 33 bp, Homo Sapiens; identical to SEQ ID NO: 16746

SEQ ID NO: 48336 - DNA, 35 bp, Homo Sapiens
gccccagtggcctaatggataaggcattggcctcc

SEQ ID NO: 48337 - DNA, 23 bp, Homo Sapiens
gcccccatgtctaacaacatggc

SEQ ID NO: 48338 - DNA, 24 bp, Homo Sapiens
gcccccatgtctaacaacatggct

SEQ ID NO: 48339 - DNA, 25 bp, Homo Sapiens
gcccccatgtctaacaacatggctt

SEQ ID NO: 48340 - DNA, 30 bp, Homo Sapiens; identical to SEQ ID NO: 16767

SEQ ID NO: 48341 - DNA, 32 bp, Homo Sapiens; identical to SEQ ID NO: 16769

SEQ ID NO: 48342 - DNA, 24 bp, Homo Sapiens
gccccgggttcaatccccggcacc

SEQ ID NO: 48343 - DNA, 25 bp, Homo Sapiens
gccccgggttcaatccccggcacct

SEQ ID NO: 48344 - DNA, 30 bp, Homo Sapiens; identical to SEQ ID NO: 16772

SEQ ID NO: 48345 - DNA, 31 bp, Homo Sapiens; identical to SEQ ID NO: 16773

SEQ ID NO: 48346 - DNA, 30 bp, Homo Sapiens; identical to SEQ ID NO: 37434

SEQ ID NO: 48347 - DNA, 16 bp, Homo Sapiens
gcccgcatcctccacc

SEQ ID NO: 48348 - DNA, 17 bp, Homo Sapiens
gcccgcatcctccacca

SEQ ID NO: 48349 - DNA, 16 bp, Homo Sapiens
gcccgcattctccacc

SEQ ID NO: 48350 - DNA, 16 bp, Homo Sapiens
gcccggatagctcagt

SEQ ID NO: 48351 - DNA, 18 bp, Homo Sapiens
gcccggatagctcagtcg

SEQ ID NO: 48352 - DNA, 19 bp, Homo Sapiens
gcccggatagctcagtcgg

SEQ ID NO: 48353 - DNA, 22 bp, Homo Sapiens
gcccggatagctcagtcggtag

SEQ ID NO: 48354 - DNA, 23 bp, Homo Sapiens
gcccggatagctcagtcggtaga

SEQ ID NO: 48355 - DNA, 24 bp, Homo Sapiens
gcccggatagctcagtcggtagag

SEQ ID NO: 48356 - DNA, 25 bp, Homo Sapiens
gcccggatagctcagtcggtagagc

SEQ ID NO: 48357 - DNA, 26 bp, Homo Sapiens
gcccggatagctcagtcggtagagca

SEQ ID NO: 48358 - DNA, 27 bp, Homo Sapiens
gcccggatagctcagtcggtagagcat

SEQ ID NO: 48359 - DNA, 28 bp, Homo Sapiens
gcccggatagctcagtcggtagagcatc

SEQ ID NO: 48360 - DNA, 29 bp, Homo Sapiens
gcccggatagctcagtcggtagagcatca

SEQ ID NO: 48361 - DNA, 30 bp, Homo Sapiens; identical to SEQ ID NO: 16802

SEQ ID NO: 48362 - DNA, 31 bp, Homo Sapiens; identical to SEQ ID NO: 16803

SEQ ID NO: 48363 - DNA, 32 bp, Homo Sapiens; identical to SEQ ID NO: 16804

SEQ ID NO: 48364 - DNA, 33 bp, Homo Sapiens; identical to SEQ ID NO: 16805

SEQ ID NO: 48365 - DNA, 34 bp, Homo Sapiens; identical to SEQ ID NO: 16806

SEQ ID NO: 48366 - DNA, 35 bp, Homo Sapiens; identical to SEQ ID NO: 16807

SEQ ID NO: 48367 - DNA, 36 bp, Homo Sapiens; identical to SEQ ID NO: 16808

SEQ ID NO: 48368 - DNA, 16 bp, Homo Sapiens
gcccggctagctcagt

SEQ ID NO: 48369 - DNA, 33 bp, Homo Sapiens; identical to SEQ ID NO: 16815

SEQ ID NO: 48370 - DNA, 19 bp, Homo Sapiens
gcccggctagctcagtcgg

SEQ ID NO: 48371 - DNA, 25 bp, Homo Sapiens
gcccggctagctcagtcggtagagc

SEQ ID NO: 48372 - DNA, 26 bp, Homo Sapiens
gcccggctagctcagtcggtagagca

SEQ ID NO: 48373 - DNA, 27 bp, Homo Sapiens
gcccggctagctcagtcggtagagcat

SEQ ID NO: 48374 - DNA, 28 bp, Homo Sapiens
gcccggctagctcagtcggtagagcatg

SEQ ID NO: 48375 - DNA, 30 bp, Homo Sapiens; identical to SEQ ID NO: 16827

SEQ ID NO: 48376 - DNA, 31 bp, Homo Sapiens; identical to SEQ ID NO: 16828

SEQ ID NO: 48377 - DNA, 32 bp, Homo Sapiens; identical to SEQ ID NO: 16829

SEQ ID NO: 48378 - DNA, 33 bp, Homo Sapiens; identical to SEQ ID NO: 16830

SEQ ID NO: 48379 - DNA, 34 bp, Homo Sapiens; identical to SEQ ID NO: 16831

SEQ ID NO: 48380 - DNA, 35 bp, Homo Sapiens; identical to SEQ ID NO: 16832

SEQ ID NO: 48381 - DNA, 33 bp, Homo Sapiens; identical to SEQ ID NO: 16835

SEQ ID NO: 48382 - DNA, 34 bp, Homo Sapiens; identical to SEQ ID NO: 16836

SEQ ID NO: 48383 - DNA, 35 bp, Homo Sapiens; identical to SEQ ID NO: 16837

SEQ ID NO: 48384 - DNA, 36 bp, Homo Sapiens; identical to SEQ ID NO: 16838

SEQ ID NO: 48385 - DNA, 40 bp, Homo Sapiens; identical to SEQ ID NO: 16842

SEQ ID NO: 48386 - DNA, 41 bp, Homo Sapiens; identical to SEQ ID NO: 16843

SEQ ID NO: 48387 - DNA, 29 bp, Homo Sapiens
gcccggctagctcagtcggtagagcatgg

SEQ ID NO: 48388 - DNA, 30 bp, Homo Sapiens; identical to SEQ ID NO: 16847

SEQ ID NO: 48389 - DNA, 31 bp, Homo Sapiens; identical to SEQ ID NO: 16848

SEQ ID NO: 48390 - DNA, 32 bp, Homo Sapiens; identical to SEQ ID NO: 16849

SEQ ID NO: 48391 - DNA, 33 bp, Homo Sapiens; identical to SEQ ID NO: 16850

SEQ ID NO: 48392 - DNA, 34 bp, Homo Sapiens; identical to SEQ ID NO: 16851

SEQ ID NO: 48393 - DNA, 35 bp, Homo Sapiens; identical to SEQ ID NO: 16852

SEQ ID NO: 48394 - DNA, 36 bp, Homo Sapiens; identical to SEQ ID NO: 16853

SEQ ID NO: 48395 - DNA, 37 bp, Homo Sapiens; identical to SEQ ID NO: 16854

SEQ ID NO: 48396 - DNA, 38 bp, Homo Sapiens; identical to SEQ ID NO: 16855

SEQ ID NO: 48397 - DNA, 39 bp, Homo Sapiens; identical to SEQ ID NO: 16856

SEQ ID NO: 48398 - DNA, 40 bp, Homo Sapiens; identical to SEQ ID NO: 16857

SEQ ID NO: 48399 - DNA, 41 bp, Homo Sapiens; identical to SEQ ID NO: 16858

SEQ ID NO: 48400 - DNA, 42 bp, Homo Sapiens; identical to SEQ ID NO: 16859

SEQ ID NO: 48401 - DNA, 25 bp, Homo Sapiens
gcccgggttcgactcccggtgtggg

SEQ ID NO: 48402 - DNA, 26 bp, Homo Sapiens
gcccgggttcgactcccggtgtggga

SEQ ID NO: 48403 - DNA, 27 bp, Homo Sapiens
gcccgggttcgactcccggtgtgggaa

SEQ ID NO: 48404 - DNA, 28 bp, Homo Sapiens
gcccgggttcgactcccggtgtgggaac

SEQ ID NO: 48405 - DNA, 29 bp, Homo Sapiens
gcccgggttcgactcccggtgtgggaacc

SEQ ID NO: 48406 - DNA, 30 bp, Homo Sapiens; identical to SEQ ID NO: 16865

SEQ ID NO: 48407 - DNA, 16 bp, Homo Sapiens
gccctcttagcgcagc

SEQ ID NO: 48408 - DNA, 19 bp, Homo Sapiens
gccgaaatagctcagttgg

SEQ ID NO: 48409 - DNA, 20 bp, Homo Sapiens
gccgaaatagctcagttggg

SEQ ID NO: 48410 - DNA, 21 bp, Homo Sapiens
gccgaaatagctcagttggga

SEQ ID NO: 48411 - DNA, 22 bp, Homo Sapiens
gccgaaatagctcagttgggag

SEQ ID NO: 48412 - DNA, 23 bp, Homo Sapiens
gccgaaatagctcagttgggaga

SEQ ID NO: 48413 - DNA, 24 bp, Homo Sapiens
gccgaaatagctcagttgggagag

SEQ ID NO: 48414 - DNA, 25 bp, Homo Sapiens
gccgaaatagctcagttgggagagc

SEQ ID NO: 48415 - DNA, 33 bp, Homo Sapiens; identical to SEQ ID NO: 16890

SEQ ID NO: 48416 - DNA, 17 bp, Homo Sapiens
gccgagcggtctaaggc

SEQ ID NO: 48417 - DNA, 17 bp, Homo Sapiens
gccgaggttgtgagttc

SEQ ID NO: 48418 - DNA, 38 bp, Homo Sapiens; identical to SEQ ID NO: 16903

SEQ ID NO: 48419 - DNA, 39 bp, Homo Sapiens; identical to SEQ ID NO: 16904

SEQ ID NO: 48420 - DNA, 17 bp, Homo Sapiens
gccgcggcccgggttcg

SEQ ID NO: 48421 - DNA, 33 bp, Homo Sapiens
gccgcggcccgggttcgattcccggccagggaa

SEQ ID NO: 48422 - DNA, 29 bp, Homo Sapiens
gccgcggcccgggttcgattcccggtcag

SEQ ID NO: 48423 - DNA, 30 bp, Homo Sapiens; identical to SEQ ID NO: 16909

SEQ ID NO: 48424 - DNA, 31 bp, Homo Sapiens; identical to SEQ ID NO: 16910

SEQ ID NO: 48425 - DNA, 32 bp, Homo Sapiens; identical to SEQ ID NO: 16911

SEQ ID NO: 48426 - DNA, 33 bp, Homo Sapiens; identical to SEQ ID NO: 16912

SEQ ID NO: 48427 - DNA, 34 bp, Homo Sapiens; identical to SEQ ID NO: 16913

SEQ ID NO: 48428 - DNA, 35 bp, Homo Sapiens; identical to SEQ ID NO: 16914

SEQ ID NO: 48429 - DNA, 36 bp, Homo Sapiens; identical to SEQ ID NO: 16915

SEQ ID NO: 48430 - DNA, 16 bp, Homo Sapiens
gccgctggtgtagtgg

SEQ ID NO: 48431 - DNA, 24 bp, Homo Sapiens
gccgctggtgtagtggtatcatgc

SEQ ID NO: 48432 - DNA, 25 bp, Homo Sapiens
gccgctggtgtagtggtatcatgca

SEQ ID NO: 48433 - DNA, 27 bp, Homo Sapiens
gccgctggtgtagtggtatcatgcaag

SEQ ID NO: 48434 - DNA, 28 bp, Homo Sapiens
gccgctggtgtagtggtatcatgcaaga

SEQ ID NO: 48435 - DNA, 29 bp, Homo Sapiens
gccgctggtgtagtggtatcatgcaagat

SEQ ID NO: 48436 - DNA, 30 bp, Homo Sapiens; identical to SEQ ID NO: 16926

SEQ ID NO: 48437 - DNA, 32 bp, Homo Sapiens; identical to SEQ ID NO: 16928

SEQ ID NO: 48438 - DNA, 33 bp, Homo Sapiens; identical to SEQ ID NO: 16929

SEQ ID NO: 48439 - DNA, 16 bp, Homo Sapiens
gccgtgatcgtatagt

SEQ ID NO: 48440 - DNA, 21 bp, Homo Sapiens
gccgtgatcgtatagtggtta

SEQ ID NO: 48441 - DNA, 22 bp, Homo Sapiens
gccgtgatcgtatagtggttag

SEQ ID NO: 48442 - DNA, 23 bp, Homo Sapiens
gccgtgatcgtatagtggttagt

SEQ ID NO: 48443 - DNA, 24 bp, Homo Sapiens
gccgtgatcgtatagtggttagta

SEQ ID NO: 48444 - DNA, 25 bp, Homo Sapiens
gccgtgatcgtatagtggttagtac

SEQ ID NO: 48445 - DNA, 26 bp, Homo Sapiens
gccgtgatcgtatagtggttagtact

SEQ ID NO: 48446 - DNA, 27 bp, Homo Sapiens
gccgtgatcgtatagtggttagtactc

SEQ ID NO: 48447 - DNA, 28 bp, Homo Sapiens
gccgtgatcgtatagtggttagtactct

SEQ ID NO: 48448 - DNA, 29 bp, Homo Sapiens
gccgtgatcgtatagtggttagtactctg

SEQ ID NO: 48449 - DNA, 30 bp, Homo Sapiens; identical to SEQ ID NO: 16951

SEQ ID NO: 48450 - DNA, 31 bp, Homo Sapiens; identical to SEQ ID NO: 16952

SEQ ID NO: 48451 - DNA, 32 bp, Homo Sapiens; identical to SEQ ID NO: 16953

SEQ ID NO: 48452 - DNA, 33 bp, Homo Sapiens; identical to SEQ ID NO: 16954

SEQ ID NO: 48453 - DNA, 34 bp, Homo Sapiens; identical to SEQ ID NO: 16955

SEQ ID NO: 48454 - DNA, 35 bp, Homo Sapiens; identical to SEQ ID NO: 16956

SEQ ID NO: 48455 - DNA, 36 bp, Homo Sapiens; identical to SEQ ID NO: 16957

SEQ ID NO: 48456 - DNA, 37 bp, Homo Sapiens; identical to SEQ ID NO: 16958

SEQ ID NO: 48457 - DNA, 38 bp, Homo Sapiens; identical to SEQ ID NO: 16959

SEQ ID NO: 48458 - DNA, 39 bp, Homo Sapiens; identical to SEQ ID NO: 16960

SEQ ID NO: 48459 - DNA, 45 bp, Homo Sapiens; identical to SEQ ID NO: 16966

SEQ ID NO: 48460 - DNA, 16 bp, Homo Sapiens
gcctcacctggagcac

SEQ ID NO: 48461 - DNA, 17 bp, Homo Sapiens
gcctcacctggagcacc

SEQ ID NO: 48462 - DNA, 37 bp, Homo Sapiens
gcctcctaagccagggattgtgggttcgagtcccatc

SEQ ID NO: 48463 - DNA, 19 bp, Homo Sapiens
gcctcgttagcgcagtagg

SEQ ID NO: 48464 - DNA, 33 bp, Homo Sapiens; identical to SEQ ID NO: 16989

SEQ ID NO: 48465 - DNA, 16 bp, Homo Sapiens
gcctgccacgcgggag

SEQ ID NO: 48466 - DNA, 24 bp, Homo Sapiens
gcctggatagctcagtcggtagag

SEQ ID NO: 48467 - DNA, 27 bp, Homo Sapiens
gcctggatagctcagtcggtagagcat

SEQ ID NO: 48468 - DNA, 28 bp, Homo Sapiens
gcctggatagctcagtcggtagagcatc

SEQ ID NO: 48469 - DNA, 32 bp, Homo Sapiens; identical to SEQ ID NO: 17001

SEQ ID NO: 48470 - DNA, 33 bp, Homo Sapiens; identical to SEQ ID NO: 17002

SEQ ID NO: 48471 - DNA, 32 bp, Homo Sapiens; identical to SEQ ID NO: 17006

SEQ ID NO: 48472 - DNA, 20 bp, Homo Sapiens
gcctgggtagctcagtcggt

SEQ ID NO: 48473 - DNA, 28 bp, Homo Sapiens
gcctgggtagctcagtcggtagagcatc

SEQ ID NO: 48474 - DNA, 32 bp, Homo Sapiens; identical to SEQ ID NO: 17013

SEQ ID NO: 48475 - DNA, 33 bp, Homo Sapiens; identical to SEQ ID NO: 17014

SEQ ID NO: 48476 - DNA, 20 bp, Homo Sapiens
gcctgtcacgcgggagaccg

SEQ ID NO: 48477 - DNA, 21 bp, Homo Sapiens
gcctgtcacgcgggagaccgg

SEQ ID NO: 48478 - DNA, 22 bp, Homo Sapiens
gcctgtcacgcgggagaccggg

SEQ ID NO: 48479 - DNA, 40 bp, Homo Sapiens; identical to SEQ ID NO: 17018

SEQ ID NO: 48480 - DNA, 44 bp, Homo Sapiens; identical to SEQ ID NO: 17019

SEQ ID NO: 48481 - DNA, 45 bp, Homo Sapiens; identical to SEQ ID NO: 17020

SEQ ID NO: 48482 - DNA, 39 bp, Homo Sapiens; identical to SEQ ID NO: 17022

SEQ ID NO: 48483 - DNA, 40 bp, Homo Sapiens; identical to SEQ ID NO: 17023

SEQ ID NO: 48484 - DNA, 41 bp, Homo Sapiens; identical to SEQ ID NO: 17024

SEQ ID NO: 48485 - DNA, 42 bp, Homo Sapiens; identical to SEQ ID NO: 17025

SEQ ID NO: 48486 - DNA, 43 bp, Homo Sapiens; identical to SEQ ID NO: 17026

SEQ ID NO: 48487 - DNA, 44 bp, Homo Sapiens; identical to SEQ ID NO: 17027

SEQ ID NO: 48488 - DNA, 45 bp, Homo Sapiens; identical to SEQ ID NO: 17028

SEQ ID NO: 48489 - DNA, 46 bp, Homo Sapiens; identical to SEQ ID NO: 17029

SEQ ID NO: 48490 - DNA, 30 bp, Homo Sapiens; identical to SEQ ID NO: 37578

SEQ ID NO: 48491 - DNA, 31 bp, Homo Sapiens; identical to SEQ ID NO: 37579

SEQ ID NO: 48492 - DNA, 32 bp, Homo Sapiens; identical to SEQ ID NO: 37580

SEQ ID NO: 48493 - DNA, 16 bp, Homo Sapiens
gcgaaaggtccccggt

SEQ ID NO: 48494 - DNA, 28 bp, Homo Sapiens
gcgaaaggtccccggttcgaaaccgggc

SEQ ID NO: 48495 - DNA, 36 bp, Homo Sapiens; identical to SEQ ID NO: 37585

SEQ ID NO: 48496 - DNA, 37 bp, Homo Sapiens; identical to SEQ ID NO: 17039

SEQ ID NO: 48497 - DNA, 38 bp, Homo Sapiens; identical to SEQ ID NO: 17040

SEQ ID NO: 48498 - DNA, 29 bp, Homo Sapiens
gcgaaaggtccccggttcgaaaccgggcg

SEQ ID NO: 48499 - DNA, 34 bp, Homo Sapiens; identical to SEQ ID NO: 17043

SEQ ID NO: 48500 - DNA, 35 bp, Homo Sapiens; identical to SEQ ID NO: 17044

SEQ ID NO: 48501 - DNA, 36 bp, Homo Sapiens; identical to SEQ ID NO: 17045

SEQ ID NO: 48502 - DNA, 37 bp, Homo Sapiens; identical to SEQ ID NO: 17046

SEQ ID NO: 48503 - DNA, 38 bp, Homo Sapiens; identical to SEQ ID NO: 17047

SEQ ID NO: 48504 - DNA, 37 bp, Homo Sapiens; identical to SEQ ID NO: 17048

SEQ ID NO: 48505 - DNA, 35 bp, Homo Sapiens; identical to SEQ ID NO: 17051

SEQ ID NO: 48506 - DNA, 36 bp, Homo Sapiens; identical to SEQ ID NO: 37596

SEQ ID NO: 48507 - DNA, 37 bp, Homo Sapiens; identical to SEQ ID NO: 17052

SEQ ID NO: 48508 - DNA, 38 bp, Homo Sapiens; identical to SEQ ID NO: 17053

SEQ ID NO: 48509 - DNA, 27 bp, Homo Sapiens
gcgacccgggttcgattcccgggcggc

SEQ ID NO: 48510 - DNA, 28 bp, Homo Sapiens
gcgacccgggttcgattcccgggcggcg

SEQ ID NO: 48511 - DNA, 16 bp, Homo Sapiens
gcgagaggtagcggga

SEQ ID NO: 48512 - DNA, 17 bp, Homo Sapiens
gcgagaggtagcgggat

SEQ ID NO: 48513 - DNA, 16 bp, Homo Sapiens
gcgagaggtcccgggt

SEQ ID NO: 48514 - DNA, 32 bp, Homo Sapiens; identical to SEQ ID NO: 17062

SEQ ID NO: 48515 - DNA, 33 bp, Homo Sapiens; identical to SEQ ID NO: 37605

SEQ ID NO: 48516 - DNA, 34 bp, Homo Sapiens; identical to SEQ ID NO: 17063

SEQ ID NO: 48517 - DNA, 35 bp, Homo Sapiens; identical to SEQ ID NO: 17064

SEQ ID NO: 48518 - DNA, 36 bp, Homo Sapiens; identical to SEQ ID NO: 17065

SEQ ID NO: 48519 - DNA, 37 bp, Homo Sapiens; identical to SEQ ID NO: 17066

SEQ ID NO: 48520 - DNA, 28 bp, Homo Sapiens
gcgatccgagttcaaatctcggtggaac

SEQ ID NO: 48521 - DNA, 31 bp, Homo Sapiens; identical to SEQ ID NO: 17074

SEQ ID NO: 48522 - DNA, 32 bp, Homo Sapiens; identical to SEQ ID NO: 17075

SEQ ID NO: 48523 - DNA, 28 bp, Homo Sapiens
gcgatccgagttcaaatctcggtgggac

SEQ ID NO: 48524 - DNA, 31 bp, Homo Sapiens; identical to SEQ ID NO: 17078

SEQ ID NO: 48525 - DNA, 33 bp, Homo Sapiens
gcgatccgagttcaaatctcggtgggacctcca

SEQ ID NO: 48526 - DNA, 31 bp, Homo Sapiens; identical to SEQ ID NO: 37620

SEQ ID NO: 48527 - DNA, 31 bp, Homo Sapiens; identical to SEQ ID NO: 17081

SEQ ID NO: 48528 - DNA, 22 bp, Homo Sapiens
gcgcagcggaagcgtgctgggc

SEQ ID NO: 48529 - DNA, 19 bp, Homo Sapiens
gcgcattcggctgttaacc

SEQ ID NO: 48530 - DNA, 16 bp, Homo Sapiens
gcgccgctggtgtagt

SEQ ID NO: 48531 - DNA, 17 bp, Homo Sapiens
gcgccgctggtgtagtg

SEQ ID NO: 48532 - DNA, 18 bp, Homo Sapiens
gcgccgctggtgtagtgg

SEQ ID NO: 48533 - DNA, 20 bp, Homo Sapiens
gcgccgctggtgtagtggta

SEQ ID NO: 48534 - DNA, 21 bp, Homo Sapiens
gcgccgctggtgtagtggtat

SEQ ID NO: 48535 - DNA, 22 bp, Homo Sapiens
gcgccgctggtgtagtggtatc

SEQ ID NO: 48536 - DNA, 23 bp, Homo Sapiens
gcgccgctggtgtagtggtatca

SEQ ID NO: 48537 - DNA, 25 bp, Homo Sapiens
gcgccgctggtgtagtggtatcatg

SEQ ID NO: 48538 - DNA, 26 bp, Homo Sapiens
gcgccgctggtgtagtggtatcatgc

SEQ ID NO: 48539 - DNA, 27 bp, Homo Sapiens
gcgccgctggtgtagtggtatcatgca

SEQ ID NO: 48540 - DNA, 28 bp, Homo Sapiens
gcgccgctggtgtagtggtatcatgcaa

SEQ ID NO: 48541 - DNA, 29 bp, Homo Sapiens
gcgccgctggtgtagtggtatcatgcaag

SEQ ID NO: 48542 - DNA, 30 bp, Homo Sapiens; identical to SEQ ID NO: 17110

SEQ ID NO: 48543 - DNA, 31 bp, Homo Sapiens; identical to SEQ ID NO: 17111

SEQ ID NO: 48544 - DNA, 32 bp, Homo Sapiens; identical to SEQ ID NO: 17112

SEQ ID NO: 48545 - DNA, 33 bp, Homo Sapiens; identical to SEQ ID NO: 17113

SEQ ID NO: 48546 - DNA, 34 bp, Homo Sapiens; identical to SEQ ID NO: 17114

SEQ ID NO: 48547 - DNA, 35 bp, Homo Sapiens; identical to SEQ ID NO: 17115

SEQ ID NO: 48548 - DNA, 36 bp, Homo Sapiens; identical to SEQ ID NO: 17116

SEQ ID NO: 48549 - DNA, 37 bp, Homo Sapiens; identical to SEQ ID NO: 17117

SEQ ID NO: 48550 - DNA, 39 bp, Homo Sapiens; identical to SEQ ID NO: 17118

SEQ ID NO: 48551 - DNA, 40 bp, Homo Sapiens; identical to SEQ ID NO: 17119

SEQ ID NO: 48552 - DNA, 19 bp, Homo Sapiens
gcgcgttcggctgttaacc

SEQ ID NO: 48553 - DNA, 22 bp, Homo Sapiens
gcgcgttcggctgttaaccgga

SEQ ID NO: 48554 - DNA, 23 bp, Homo Sapiens
gcgcgttcggctgttaaccggaa

SEQ ID NO: 48555 - DNA, 17 bp, Homo Sapiens
gcgctctcaccgccgcg

SEQ ID NO: 48556 - DNA, 19 bp, Homo Sapiens
gcgctctcaccgccgcggc

SEQ ID NO: 48557 - DNA, 20 bp, Homo Sapiens
gcgctctcaccgccgcggcc

SEQ ID NO: 48558 - DNA, 21 bp, Homo Sapiens
gcgctctcaccgccgcggccc

SEQ ID NO: 48559 - DNA, 26 bp, Homo Sapiens
gcgctctcaccgccgcggcccgggtt

SEQ ID NO: 48560 - DNA, 33 bp, Homo Sapiens; identical to SEQ ID NO: 17144

SEQ ID NO: 48561 - DNA, 44 bp, Homo Sapiens; identical to SEQ ID NO: 17148

SEQ ID NO: 48562 - DNA, 45 bp, Homo Sapiens; identical to SEQ ID NO: 17149

SEQ ID NO: 48563 - DNA, 46 bp, Homo Sapiens; identical to SEQ ID NO: 17150

SEQ ID NO: 48564 - DNA, 47 bp, Homo Sapiens; identical to SEQ ID NO: 17151

SEQ ID NO: 48565 - DNA, 16 bp, Homo Sapiens
gcggaagcgtgctggg

SEQ ID NO: 48566 - DNA, 17 bp, Homo Sapiens
gcggaagcgtgctgggc

SEQ ID NO: 48567 - DNA, 18 bp, Homo Sapiens
gcggaagcgtgctgggcc

SEQ ID NO: 48568 - DNA, 19 bp, Homo Sapiens
gcggaagcgtgctgggccc

SEQ ID NO: 48569 - DNA, 20 bp, Homo Sapiens
gcggaagcgtgctgggccca

SEQ ID NO: 48570 - DNA, 25 bp, Homo Sapiens
gcggaagcgtgctgggcccataacc

SEQ ID NO: 48571 - DNA, 26 bp, Homo Sapiens
gcggaagcgtgctgggcccataaccc

SEQ ID NO: 48572 - DNA, 16 bp, Homo Sapiens
gcggcccgggttcgac

SEQ ID NO: 48573 - DNA, 17 bp, Homo Sapiens
gcggcccgggttcgact

SEQ ID NO: 48574 - DNA, 18 bp, Homo Sapiens
gcggcccgggttcgactc

SEQ ID NO: 48575 - DNA, 19 bp, Homo Sapiens
gcggcccgggttcgactcc

SEQ ID NO: 48576 - DNA, 20 bp, Homo Sapiens
gcggcccgggttcgactccc

SEQ ID NO: 48577 - DNA, 21 bp, Homo Sapiens
gcggcccgggttcgactcccg

SEQ ID NO: 48578 - DNA, 23 bp, Homo Sapiens
gcggcccgggttcgactcccggt

SEQ ID NO: 48579 - DNA, 24 bp, Homo Sapiens
gcggcccgggttcgactcccggtg

SEQ ID NO: 48580 - DNA, 25 bp, Homo Sapiens
gcggcccgggttcgactcccggtgt

SEQ ID NO: 48581 - DNA, 26 bp, Homo Sapiens
gcggcccgggttcgactcccggtgtg

SEQ ID NO: 48582 - DNA, 28 bp, Homo Sapiens
gcggcccgggttcgactcccggtgtggg

SEQ ID NO: 48583 - DNA, 29 bp, Homo Sapiens
gcggcccgggttcgactcccggtgtggga

SEQ ID NO: 48584 - DNA, 30 bp, Homo Sapiens; identical to SEQ ID NO: 17183

SEQ ID NO: 48585 - DNA, 31 bp, Homo Sapiens; identical to SEQ ID NO: 17184

SEQ ID NO: 48586 - DNA, 32 bp, Homo Sapiens; identical to SEQ ID NO: 17185

SEQ ID NO: 48587 - DNA, 33 bp, Homo Sapiens; identical to SEQ ID NO: 17186

SEQ ID NO: 48588 - DNA, 19 bp, Homo Sapiens
gcggcccgggttcgattcc

SEQ ID NO: 48589 - DNA, 20 bp, Homo Sapiens
gcggcccgggttcgattccc

SEQ ID NO: 48590 - DNA, 23 bp, Homo Sapiens
gcggcccgggttcgattcccggt

SEQ ID NO: 48591 - DNA, 24 bp, Homo Sapiens
gcggcccgggttcgattcccggtc

SEQ ID NO: 48592 - DNA, 25 bp, Homo Sapiens
gcggcccgggttcgattcccggtca

SEQ ID NO: 48593 - DNA, 27 bp, Homo Sapiens
gcggcccgggttcgattcccggtcagg

SEQ ID NO: 48594 - DNA, 30 bp, Homo Sapiens; identical to SEQ ID NO: 17201

SEQ ID NO: 48595 - DNA, 31 bp, Homo Sapiens; identical to SEQ ID NO: 17202

SEQ ID NO: 48596 - DNA, 32 bp, Homo Sapiens; identical to SEQ ID NO: 17203

SEQ ID NO: 48597 - DNA, 33 bp, Homo Sapiens; identical to SEQ ID NO: 17204

SEQ ID NO: 48598 - DNA, 31 bp, Homo Sapiens; identical to SEQ ID NO: 17213

SEQ ID NO: 48599 - DNA, 32 bp, Homo Sapiens; identical to SEQ ID NO: 17214

SEQ ID NO: 48600 - DNA, 35 bp, Homo Sapiens; identical to SEQ ID NO: 17217

SEQ ID NO: 48601 - DNA, 36 bp, Homo Sapiens; identical to SEQ ID NO: 17218

SEQ ID NO: 48602 - DNA, 37 bp, Homo Sapiens; identical to SEQ ID NO: 17219

SEQ ID NO: 48603 - DNA, 36 bp, Homo Sapiens; identical to SEQ ID NO: 17222

SEQ ID NO: 48604 - DNA, 27 bp, Homo Sapiens
gcgggagaccggggttcgattccccga

SEQ ID NO: 48605 - DNA, 28 bp, Homo Sapiens
gcgggagaccggggttcgattccccgac

SEQ ID NO: 48606 - DNA, 29 bp, Homo Sapiens
gcgggagaccggggttcgattccccgacg

SEQ ID NO: 48607 - DNA, 30 bp, Homo Sapiens; identical to SEQ ID NO: 17228

SEQ ID NO: 48608 - DNA, 31 bp, Homo Sapiens; identical to SEQ ID NO: 17229

SEQ ID NO: 48609 - DNA, 32 bp, Homo Sapiens; identical to SEQ ID NO: 17230

SEQ ID NO: 48610 - DNA, 33 bp, Homo Sapiens; identical to SEQ ID NO: 17231

SEQ ID NO: 48611 - DNA, 34 bp, Homo Sapiens; identical to SEQ ID NO: 17232

SEQ ID NO: 48612 - DNA, 35 bp, Homo Sapiens; identical to SEQ ID NO: 17233

SEQ ID NO: 48613 - DNA, 36 bp, Homo Sapiens; identical to SEQ ID NO: 17234

SEQ ID NO: 48614 - DNA, 37 bp, Homo Sapiens; identical to SEQ ID NO: 17235

SEQ ID NO: 48615 - DNA, 16 bp, Homo Sapiens
gcgggaggcccgggtt

SEQ ID NO: 48616 - DNA, 27 bp, Homo Sapiens
gcgggaggcccgggttcgattcccggc

SEQ ID NO: 48617 - DNA, 28 bp, Homo Sapiens
gcgggaggcccgggttcgattcccggcc

SEQ ID NO: 48618 - DNA, 29 bp, Homo Sapiens
gcgggaggcccgggttcgattcccggcca

SEQ ID NO: 48619 - DNA, 30 bp, Homo Sapiens; identical to SEQ ID NO: 17241

SEQ ID NO: 48620 - DNA, 32 bp, Homo Sapiens; identical to SEQ ID NO: 17243

SEQ ID NO: 48621 - DNA, 33 bp, Homo Sapiens; identical to SEQ ID NO: 17244

SEQ ID NO: 48622 - DNA, 34 bp, Homo Sapiens; identical to SEQ ID NO: 17245

SEQ ID NO: 48623 - DNA, 35 bp, Homo Sapiens; identical to SEQ ID NO: 17246

SEQ ID NO: 48624 - DNA, 36 bp, Homo Sapiens; identical to SEQ ID NO: 17247

SEQ ID NO: 48625 - DNA, 37 bp, Homo Sapiens; identical to SEQ ID NO: 17248

SEQ ID NO: 48626 - DNA, 32 bp, Homo Sapiens; identical to SEQ ID NO: 17249

SEQ ID NO: 48627 - DNA, 36 bp, Homo Sapiens; identical to SEQ ID NO: 17250

SEQ ID NO: 48628 - DNA, 37 bp, Homo Sapiens
gcgggaggcccgggttcgattcccggcccatgcacca

SEQ ID NO: 48629 - DNA, 25 bp, Homo Sapiens
gcgggttcgaaccccgtccgtgcct

SEQ ID NO: 48630 - DNA, 18 bp, Homo Sapiens
gcggttaggattcctggt

SEQ ID NO: 48631 - DNA, 19 bp, Homo Sapiens
gcggttaggattcctggtt

SEQ ID NO: 48632 - DNA, 21 bp, Homo Sapiens
gcggttaggattcctggtttt

SEQ ID NO: 48633 - DNA, 19 bp, Homo Sapiens
gcggttatcacgtctgctt

SEQ ID NO: 48634 - DNA, 20 bp, Homo Sapiens
gcggttatcacgtctgcttt

SEQ ID NO: 48635 - DNA, 19 bp, Homo Sapiens
gcgtgctgggcccataacc

SEQ ID NO: 48636 - DNA, 20 bp, Homo Sapiens
gcgtgctgggcccataaccc

SEQ ID NO: 48637 - DNA, 23 bp, Homo Sapiens
gcgtgctgggcccataacccaga

SEQ ID NO: 48638 - DNA, 31 bp, Homo Sapiens; identical to SEQ ID NO: 17279

SEQ ID NO: 48639 - DNA, 33 bp, Homo Sapiens; identical to SEQ ID NO: 17280

SEQ ID NO: 48640 - DNA, 34 bp, Homo Sapiens; identical to SEQ ID NO: 17281

SEQ ID NO: 48641 - DNA, 35 bp, Homo Sapiens; identical to SEQ ID NO: 17282

SEQ ID NO: 48642 - DNA, 16 bp, Homo Sapiens
gcgtggccgagcggtc

SEQ ID NO: 48643 - DNA, 18 bp, Homo Sapiens
gcgtggccgagcggtcta

SEQ ID NO: 48644 - DNA, 20 bp, Homo Sapiens
gcgtggccgagcggtctaag

SEQ ID NO: 48645 - DNA, 22 bp, Homo Sapiens
gcgtggccgagcggtctaaggc

SEQ ID NO: 48646 - DNA, 31 bp, Homo Sapiens
gcgtggcctaatggataaggcgtctgacttc

SEQ ID NO: 48647 - DNA, 29 bp, Homo Sapiens
gcgtgggttcgaatcccaccttcgtcgcc

SEQ ID NO: 48648 - DNA, 28 bp, Homo Sapiens
gcgtgggttcgaatcccatcctcgtcgc

SEQ ID NO: 48649 - DNA, 29 bp, Homo Sapiens
gcgtgggttcgaatcccatcctcgtcgcc

SEQ ID NO: 48650 - DNA, 30 bp, Homo Sapiens; identical to SEQ ID NO: 17298

SEQ ID NO: 48651 - DNA, 21 bp, Homo Sapiens
gcgttcaggtcgcagtctccc

SEQ ID NO: 48652 - DNA, 24 bp, Homo Sapiens
gcgttcgattcccggtcagggaac

SEQ ID NO: 48653 - DNA, 25 bp, Homo Sapiens
gcgttcgattcccggtcagggaacc

SEQ ID NO: 48654 - DNA, 26 bp, Homo Sapiens
gcgttcgattcccggtcagggaacca

SEQ ID NO: 48655 - DNA, 16 bp, Homo Sapiens
gcgttcggctgttaac

SEQ ID NO: 48656 - DNA, 16 bp, Homo Sapiens
gcgttggtggtatagt

SEQ ID NO: 48657 - DNA, 17 bp, Homo Sapiens
gcgttggtggtatagtg

SEQ ID NO: 48658 - DNA, 18 bp, Homo Sapiens
gcgttggtggtatagtgg

SEQ ID NO: 48659 - DNA, 19 bp, Homo Sapiens
gcgttggtggtatagtggt

SEQ ID NO: 48660 - DNA, 28 bp, Homo Sapiens
gcgttggtggtatagtggtaagcatagc

SEQ ID NO: 48661 - DNA, 29 bp, Homo Sapiens
gcgttggtggtatagtggtaagcatagct

SEQ ID NO: 48662 - DNA, 30 bp, Homo Sapiens; identical to SEQ ID NO: 17317

SEQ ID NO: 48663 - DNA, 31 bp, Homo Sapiens; identical to SEQ ID NO: 17318

SEQ ID NO: 48664 - DNA, 32 bp, Homo Sapiens; identical to SEQ ID NO: 17319

SEQ ID NO: 48665 - DNA, 33 bp, Homo Sapiens; identical to SEQ ID NO: 17320

SEQ ID NO: 48666 - DNA, 36 bp, Homo Sapiens; identical to SEQ ID NO: 17323

SEQ ID NO: 48667 - DNA, 22 bp, Homo Sapiens
gcgttggtggtatagtggtgag

SEQ ID NO: 48668 - DNA, 23 bp, Homo Sapiens
gcgttggtggtatagtggtgagc

SEQ ID NO: 48669 - DNA, 24 bp, Homo Sapiens
gcgttggtggtatagtggtgagca

SEQ ID NO: 48670 - DNA, 26 bp, Homo Sapiens
gcgttggtggtatagtggtgagcata

SEQ ID NO: 48671 - DNA, 27 bp, Homo Sapiens
gcgttggtggtatagtggtgagcatag

SEQ ID NO: 48672 - DNA, 28 bp, Homo Sapiens
gcgttggtggtatagtggtgagcatagc

SEQ ID NO: 48673 - DNA, 29 bp, Homo Sapiens
gcgttggtggtatagtggtgagcatagct

SEQ ID NO: 48674 - DNA, 30 bp, Homo Sapiens; identical to SEQ ID NO: 17335

SEQ ID NO: 48675 - DNA, 31 bp, Homo Sapiens; identical to SEQ ID NO: 17336

SEQ ID NO: 48676 - DNA, 32 bp, Homo Sapiens; identical to SEQ ID NO: 17337

SEQ ID NO: 48677 - DNA, 33 bp, Homo Sapiens; identical to SEQ ID NO: 17338

SEQ ID NO: 48678 - DNA, 34 bp, Homo Sapiens; identical to SEQ ID NO: 17339

SEQ ID NO: 48679 - DNA, 35 bp, Homo Sapiens; identical to SEQ ID NO: 17340

SEQ ID NO: 48680 - DNA, 36 bp, Homo Sapiens; identical to SEQ ID NO: 17341

SEQ ID NO: 48681 - DNA, 23 bp, Homo Sapiens
gcgttggtggtatagtggttagc

SEQ ID NO: 48682 - DNA, 26 bp, Homo Sapiens
gcgttggtggtatagtggttagcata

SEQ ID NO: 48683 - DNA, 27 bp, Homo Sapiens
gcgttggtggtatagtggttagcatag

SEQ ID NO: 48684 - DNA, 28 bp, Homo Sapiens
gcgttggtggtatagtggttagcatagc

SEQ ID NO: 48685 - DNA, 29 bp, Homo Sapiens
gcgttggtggtatagtggttagcatagct

SEQ ID NO: 48686 - DNA, 30 bp, Homo Sapiens; identical to SEQ ID NO: 17358

SEQ ID NO: 48687 - DNA, 31 bp, Homo Sapiens; identical to SEQ ID NO: 17359

SEQ ID NO: 48688 - DNA, 32 bp, Homo Sapiens; identical to SEQ ID NO: 17360

SEQ ID NO: 48689 - DNA, 33 bp, Homo Sapiens; identical to SEQ ID NO: 17361

SEQ ID NO: 48690 - DNA, 34 bp, Homo Sapiens; identical to SEQ ID NO: 17362

SEQ ID NO: 48691 - DNA, 35 bp, Homo Sapiens; identical to SEQ ID NO: 17363

SEQ ID NO: 48692 - DNA, 36 bp, Homo Sapiens; identical to SEQ ID NO: 17364

SEQ ID NO: 48693 - DNA, 32 bp, Homo Sapiens; identical to SEQ ID NO: 17369

SEQ ID NO: 48694 - DNA, 18 bp, Homo Sapiens
gctaaataagctatcggg

SEQ ID NO: 48695 - DNA, 34 bp, Homo Sapiens; identical to SEQ ID NO: 17405

SEQ ID NO: 48696 - DNA, 39 bp, Homo Sapiens; identical to SEQ ID NO: 17409

SEQ ID NO: 48697 - DNA, 43 bp, Homo Sapiens; identical to SEQ ID NO: 17413

SEQ ID NO: 48698 - DNA, 16 bp, Homo Sapiens
gctaatccattgtgct

SEQ ID NO: 48699 - DNA, 33 bp, Homo Sapiens; identical to SEQ ID NO: 17430

SEQ ID NO: 48700 - DNA, 34 bp, Homo Sapiens; identical to SEQ ID NO: 17431

SEQ ID NO: 48701 - DNA, 18 bp, Homo Sapiens
gctagctcagtcggtaga

SEQ ID NO: 48702 - DNA, 19 bp, Homo Sapiens
gctagctcagtcggtagag

SEQ ID NO: 48703 - DNA, 28 bp, Homo Sapiens
gctagctcagtcggtagagcatgagact

SEQ ID NO: 48704 - DNA, 29 bp, Homo Sapiens
gctagctcagtcggtagagcatgagactc

SEQ ID NO: 48705 - DNA, 27 bp, Homo Sapiens
gctagctcagtcggtagagcatgggac

SEQ ID NO: 48706 - DNA, 28 bp, Homo Sapiens
gctagctcagtcggtagagcatgggact

SEQ ID NO: 48707 - DNA, 29 bp, Homo Sapiens
gctagctcagtcggtagagcatgggactc

SEQ ID NO: 48708 - DNA, 30 bp, Homo Sapiens; identical to SEQ ID NO: 17462

SEQ ID NO: 48709 - DNA, 31 bp, Homo Sapiens; identical to SEQ ID NO: 17463

SEQ ID NO: 48710 - DNA, 34 bp, Homo Sapiens; identical to SEQ ID NO: 17466

SEQ ID NO: 48711 - DNA, 35 bp, Homo Sapiens; identical to SEQ ID NO: 17467

SEQ ID NO: 48712 - DNA, 36 bp, Homo Sapiens; identical to SEQ ID NO: 17468

SEQ ID NO: 48713 - DNA, 44 bp, Homo Sapiens; identical to SEQ ID NO: 17470

SEQ ID NO: 48714 - DNA, 45 bp, Homo Sapiens; identical to SEQ ID NO: 17471

SEQ ID NO: 48715 - DNA, 16 bp, Homo Sapiens
gctaggattcggcgct

SEQ ID NO: 48716 - DNA, 17 bp, Homo Sapiens
gctatcgggcccatacc

SEQ ID NO: 48717 - DNA, 21 bp, Homo Sapiens
gctatcgggcccataccccga

SEQ ID NO: 48718 - DNA, 47 bp, Homo Sapiens; identical to SEQ ID NO: 17537

SEQ ID NO: 48719 - DNA, 24 bp, Homo Sapiens
gctcacatcaccccataaacacca

SEQ ID NO: 48720 - DNA, 23 bp, Homo Sapiens
gctcaggggtagagcatttgact

SEQ ID NO: 48721 - DNA, 24 bp, Homo Sapiens
gctcagtcggtagagcatgagact

SEQ ID NO: 48722 - DNA, 32 bp, Homo Sapiens; identical to SEQ ID NO: 17569

SEQ ID NO: 48723 - DNA, 24 bp, Homo Sapiens
gctcagtcggtagagcatgggact

SEQ ID NO: 48724 - DNA, 25 bp, Homo Sapiens
gctcagtcggtagagcatgggactc

SEQ ID NO: 48725 - DNA, 26 bp, Homo Sapiens
gctcagtcggtagagcatgggactct

SEQ ID NO: 48726 - DNA, 27 bp, Homo Sapiens
gctcagtcggtagagcatgggactctt

SEQ ID NO: 48727 - DNA, 32 bp, Homo Sapiens; identical to SEQ ID NO: 17583

SEQ ID NO: 48728 - DNA, 33 bp, Homo Sapiens; identical to SEQ ID NO: 17584

SEQ ID NO: 48729 - DNA, 23 bp, Homo Sapiens
gctcagtggtagagcatttgact

SEQ ID NO: 48730 - DNA, 16 bp, Homo Sapiens
gctccatagctcaggg

SEQ ID NO: 48731 - DNA, 23 bp, Homo Sapiens
gctccgaggtgattttcatattg

SEQ ID NO: 48732 - DNA, 30 bp, Homo Sapiens; identical to SEQ ID NO: 17645

SEQ ID NO: 48733 - DNA, 31 bp, Homo Sapiens; identical to SEQ ID NO: 17646

SEQ ID NO: 48734 - DNA, 31 bp, Homo Sapiens; identical to SEQ ID NO: 17650

SEQ ID NO: 48735 - DNA, 16 bp, Homo Sapiens
gctctcaccgccgcgg

SEQ ID NO: 48736 - DNA, 17 bp, Homo Sapiens
gctctcaccgccgcggc

SEQ ID NO: 48737 - DNA, 19 bp, Homo Sapiens
gctctcaccgccgcggccc

SEQ ID NO: 48738 - DNA, 20 bp, Homo Sapiens
gctctcaccgccgcggcccg

SEQ ID NO: 48739 - DNA, 23 bp, Homo Sapiens
gctctcaccgccgcggcccgggt

SEQ ID NO: 48740 - DNA, 42 bp, Homo Sapiens; identical to SEQ ID NO: 17670

SEQ ID NO: 48741 - DNA, 43 bp, Homo Sapiens; identical to SEQ ID NO: 17671

SEQ ID NO: 48742 - DNA, 45 bp, Homo Sapiens; identical to SEQ ID NO: 17673

SEQ ID NO: 48743 - DNA, 19 bp, Homo Sapiens
gctgagtgaagcattggac

SEQ ID NO: 48744 - DNA, 20 bp, Homo Sapiens
gctgagtgaagcattggact

SEQ ID NO: 48745 - DNA, 19 bp, Homo Sapiens
gctggggattgtgggttcg

SEQ ID NO: 48746 - DNA, 36 bp, Homo Sapiens; identical to SEQ ID NO: 17706

SEQ ID NO: 48747 - DNA, 37 bp, Homo Sapiens; identical to SEQ ID NO: 17707

SEQ ID NO: 48748 - DNA, 38 bp, Homo Sapiens; identical to SEQ ID NO: 17708

SEQ ID NO: 48749 - DNA, 24 bp, Homo Sapiens
gctggtgtagtggtatcatgcaag

SEQ ID NO: 48750 - DNA, 25 bp, Homo Sapiens
gctggtgtagtggtatcatgcaaga

SEQ ID NO: 48751 - DNA, 26 bp, Homo Sapiens
gctggtgtagtggtatcatgcaagat

SEQ ID NO: 48752 - DNA, 27 bp, Homo Sapiens
gctggtgtagtggtatcatgcaagatt

SEQ ID NO: 48753 - DNA, 45 bp, Homo Sapiens; identical to SEQ ID NO: 17728

SEQ ID NO: 48754 - DNA, 27 bp, Homo Sapiens
gctggttcgaatccggctcgaaggacc

SEQ ID NO: 48755 - DNA, 27 bp, Homo Sapiens
gctggttcgattccggctcgaaggacc

SEQ ID NO: 48756 - DNA, 16 bp, Homo Sapiens
gctgtgatggccgagt

SEQ ID NO: 48757 - DNA, 17 bp, Homo Sapiens
gctgtgatggccgagtg

SEQ ID NO: 48758 - DNA, 18 bp, Homo Sapiens
gctgtgatggccgagtgg

SEQ ID NO: 48759 - DNA, 22 bp, Homo Sapiens
gctgtgatggccgagtggttaa

SEQ ID NO: 48760 - DNA, 24 bp, Homo Sapiens
gctgtgatggccgagtggttaagg

SEQ ID NO: 48761 - DNA, 25 bp, Homo Sapiens
gctgtgatggccgagtggttaaggc

SEQ ID NO: 48762 - DNA, 18 bp, Homo Sapiens
gcttcaaacctgccgggg

SEQ ID NO: 48763 - DNA, 19 bp, Homo Sapiens
gcttcaaacctgccggggc

SEQ ID NO: 48764 - DNA, 20 bp, Homo Sapiens
gcttcaaacctgccggggct

SEQ ID NO: 48765 - DNA, 21 bp, Homo Sapiens
gcttcaaacctgccggggctt

SEQ ID NO: 48766 - DNA, 23 bp, Homo Sapiens
gcttcaaacctgccggggcttcc

SEQ ID NO: 48767 - DNA, 24 bp, Homo Sapiens
gcttcaaacctgccggggcttcca

SEQ ID NO: 48768 - DNA, 17 bp, Homo Sapiens
gcttctgtagtgtagtg

SEQ ID NO: 48769 - DNA, 18 bp, Homo Sapiens
gcttctgtagtgtagtgg

SEQ ID NO: 48770 - DNA, 19 bp, Homo Sapiens
gcttctgtagtgtagtggt

SEQ ID NO: 48771 - DNA, 23 bp, Homo Sapiens
gcttctgtagtgtagtggttatc

SEQ ID NO: 48772 - DNA, 25 bp, Homo Sapiens
gcttctgtagtgtagtggttatcac

SEQ ID NO: 48773 - DNA, 26 bp, Homo Sapiens
gcttctgtagtgtagtggttatcacg

SEQ ID NO: 48774 - DNA, 29 bp, Homo Sapiens
gcttctgtagtgtagtggttatcacgttc

SEQ ID NO: 48775 - DNA, 30 bp, Homo Sapiens; identical to SEQ ID NO: 17799

SEQ ID NO: 48776 - DNA, 31 bp, Homo Sapiens; identical to SEQ ID NO: 17800

SEQ ID NO: 48777 - DNA, 32 bp, Homo Sapiens; identical to SEQ ID NO: 17801

SEQ ID NO: 48778 - DNA, 33 bp, Homo Sapiens; identical to SEQ ID NO: 17802

SEQ ID NO: 48779 - DNA, 34 bp, Homo Sapiens; identical to SEQ ID NO: 17803

SEQ ID NO: 48780 - DNA, 35 bp, Homo Sapiens; identical to SEQ ID NO: 17804

SEQ ID NO: 48781 - DNA, 36 bp, Homo Sapiens; identical to SEQ ID NO: 17805

SEQ ID NO: 48782 - DNA, 37 bp, Homo Sapiens; identical to SEQ ID NO: 17806

SEQ ID NO: 48783 - DNA, 38 bp, Homo Sapiens; identical to SEQ ID NO: 17807

SEQ ID NO: 48784 - DNA, 39 bp, Homo Sapiens; identical to SEQ ID NO: 17808

SEQ ID NO: 48785 - DNA, 40 bp, Homo Sapiens; identical to SEQ ID NO: 17809

SEQ ID NO: 48786 - DNA, 41 bp, Homo Sapiens; identical to SEQ ID NO: 17810

SEQ ID NO: 48787 - DNA, 43 bp, Homo Sapiens; identical to SEQ ID NO: 17811

SEQ ID NO: 48788 - DNA, 22 bp, Homo Sapiens
gctttacacgcagaaggtcctg

SEQ ID NO: 48789 - DNA, 46 bp, Homo Sapiens; identical to SEQ ID NO: 17813

SEQ ID NO: 48790 - DNA, 38 bp, Homo Sapiens; identical to SEQ ID NO: 37914

SEQ ID NO: 48791 - DNA, 25 bp, Homo Sapiens
gctttgcacgtatgaggccccgggt

SEQ ID NO: 48792 - DNA, 39 bp, Homo Sapiens
gctttgcacgtatgaggccccgggttcaatccccggcat

SEQ ID NO: 48793 - DNA, 40 bp, Homo Sapiens; identical to SEQ ID NO: 17827

SEQ ID NO: 48794 - DNA, 41 bp, Homo Sapiens; identical to SEQ ID NO: 17828

SEQ ID NO: 48795 - DNA, 42 bp, Homo Sapiens; identical to SEQ ID NO: 37920

SEQ ID NO: 48796 - DNA, 46 bp, Homo Sapiens
gctttgcacgtatgaggccccgggttcaatccccggcatctccacc

SEQ ID NO: 48797 - DNA, 41 bp, Homo Sapiens; identical to SEQ ID NO: 17862

SEQ ID NO: 48798 - DNA, 42 bp, Homo Sapiens; identical to SEQ ID NO: 17863

SEQ ID NO: 48799 - DNA, 43 bp, Homo Sapiens; identical to SEQ ID NO: 17864

SEQ ID NO: 48800 - DNA, 44 bp, Homo Sapiens; identical to SEQ ID NO: 17865

SEQ ID NO: 48801 - DNA, 16 bp, Homo Sapiens
ggaagcgtgctgggcc

SEQ ID NO: 48802 - DNA, 17 bp, Homo Sapiens
ggaagcgtgctgggccc

SEQ ID NO: 48803 - DNA, 18 bp, Homo Sapiens
ggaagcgtgctgggccca

SEQ ID NO: 48804 - DNA, 23 bp, Homo Sapiens
ggaagcgtgctgggcccataacc

SEQ ID NO: 48805 - DNA, 24 bp, Homo Sapiens
ggaagcgtgctgggcccataaccc

SEQ ID NO: 48806 - DNA, 27 bp, Homo Sapiens
ggaagcgtgctgggcccataacccaga

SEQ ID NO: 48807 - DNA, 37 bp, Homo Sapiens; identical to SEQ ID NO: 17881

SEQ ID NO: 48808 - DNA, 38 bp, Homo Sapiens; identical to SEQ ID NO: 17882

SEQ ID NO: 48809 - DNA, 25 bp, Homo Sapiens
ggactctgaatccagcgatccgagt

SEQ ID NO: 48810 - DNA, 32 bp, Homo Sapiens; identical to SEQ ID NO: 17910

SEQ ID NO: 48811 - DNA, 33 bp, Homo Sapiens; identical to SEQ ID NO: 17911

SEQ ID NO: 48812 - DNA, 18 bp, Homo Sapiens
ggagaccggggttcgatt

SEQ ID NO: 48813 - DNA, 26 bp, Homo Sapiens
ggagaccggggttcgattccccgacg

SEQ ID NO: 48814 - DNA, 27 bp, Homo Sapiens
ggagaccggggttcgattccccgacgg

SEQ ID NO: 48815 - DNA, 28 bp, Homo Sapiens
ggagaccggggttcgattccccgacggg

SEQ ID NO: 48816 - DNA, 29 bp, Homo Sapiens
ggagaccggggttcgattccccgacgggg

SEQ ID NO: 48817 - DNA, 30 bp, Homo Sapiens; identical to SEQ ID NO: 17919

SEQ ID NO: 48818 - DNA, 31 bp, Homo Sapiens; identical to SEQ ID NO: 17920

SEQ ID NO: 48819 - DNA, 32 bp, Homo Sapiens; identical to SEQ ID NO: 17921

SEQ ID NO: 48820 - DNA, 33 bp, Homo Sapiens; identical to SEQ ID NO: 17922

SEQ ID NO: 48821 - DNA, 34 bp, Homo Sapiens; identical to SEQ ID NO: 17923

SEQ ID NO: 48822 - DNA, 31 bp, Homo Sapiens; identical to SEQ ID NO: 17927

SEQ ID NO: 48823 - DNA, 34 bp, Homo Sapiens; identical to SEQ ID NO: 17934

SEQ ID NO: 48824 - DNA, 26 bp, Homo Sapiens
ggagatgaaaacctttttccaaggac

SEQ ID NO: 48825 - DNA, 27 bp, Homo Sapiens
ggagatgaaaacctttttccaaggaca

SEQ ID NO: 48826 - DNA, 28 bp, Homo Sapiens
ggagatgaaaacctttttccaaggacac

SEQ ID NO: 48827 - DNA, 29 bp, Homo Sapiens
ggagatgaaaacctttttccaaggacacc

SEQ ID NO: 48828 - DNA, 30 bp, Homo Sapiens; identical to SEQ ID NO: 17942

SEQ ID NO: 48829 - DNA, 29 bp, Homo Sapiens
ggagatttcaacttaacttgaccgctctg

SEQ ID NO: 48830 - DNA, 30 bp, Homo Sapiens; identical to SEQ ID NO: 17956

SEQ ID NO: 48831 - DNA, 31 bp, Homo Sapiens; identical to SEQ ID NO: 17957

SEQ ID NO: 48832 - DNA, 32 bp, Homo Sapiens; identical to SEQ ID NO: 17958

SEQ ID NO: 48833 - DNA, 33 bp, Homo Sapiens; identical to SEQ ID NO: 17959

SEQ ID NO: 48834 - DNA, 19 bp, Homo Sapiens
ggagctggggattgtgggt

SEQ ID NO: 48835 - DNA, 21 bp, Homo Sapiens
ggagctggggattgtgggttc

SEQ ID NO: 48836 - DNA, 22 bp, Homo Sapiens
ggagctggggattgtgggttcg

SEQ ID NO: 48837 - DNA, 28 bp, Homo Sapiens
ggagctggggattgtgggttcgagtccc

SEQ ID NO: 48838 - DNA, 38 bp, Homo Sapiens
ggagctggggattgtgggttcgagtcccatctgggtcg

SEQ ID NO: 48839 - DNA, 40 bp, Homo Sapiens; identical to SEQ ID NO: 17963

SEQ ID NO: 48840 - DNA, 16 bp, Homo Sapiens
ggagcttaaaccccct

SEQ ID NO: 48841 - DNA, 26 bp, Homo Sapiens
ggagcttaaacccccttatttctacc

SEQ ID NO: 48842 - DNA, 16 bp, Homo Sapiens
ggaggcccgggttcga

SEQ ID NO: 48843 - DNA, 33 bp, Homo Sapiens; identical to SEQ ID NO: 17973

SEQ ID NO: 48844 - DNA, 24 bp, Homo Sapiens
ggagttaaagactttttctctgac

SEQ ID NO: 48845 - DNA, 25 bp, Homo Sapiens
ggagttaaagactttttctctgacc

SEQ ID NO: 48846 - DNA, 26 bp, Homo Sapiens
ggagttaaagactttttctctgacca

SEQ ID NO: 48847 - DNA, 17 bp, Homo Sapiens
ggataacgcgtctgact

SEQ ID NO: 48848 - DNA, 34 bp, Homo Sapiens; identical to SEQ ID NO: 18002

SEQ ID NO: 48849 - DNA, 17 bp, Homo Sapiens
ggataaggcgtctgact

SEQ ID NO: 48850 - DNA, 16 bp, Homo Sapiens
ggatagcgcattggac

SEQ ID NO: 48851 - DNA, 18 bp, Homo Sapiens
ggatagctcagtcggtag

SEQ ID NO: 48852 - DNA, 19 bp, Homo Sapiens
ggatagctcagtcggtaga

SEQ ID NO: 48853 - DNA, 20 bp, Homo Sapiens
ggatagctcagtcggtagag

SEQ ID NO: 48854 - DNA, 28 bp, Homo Sapiens
ggatagctcagtcggtagagcatcagac

SEQ ID NO: 48855 - DNA, 22 bp, Homo Sapiens
ggatcagaagattctaggttcg

SEQ ID NO: 48856 - DNA, 31 bp, Homo Sapiens; identical to SEQ ID NO: 18031

SEQ ID NO: 48857 - DNA, 16 bp, Homo Sapiens
ggatggaggcgtgggt

SEQ ID NO: 48858 - DNA, 37 bp, Homo Sapiens; identical to SEQ ID NO: 18053

SEQ ID NO: 48859 - DNA, 16 bp, Homo Sapiens
ggatggccgagcggtc

SEQ ID NO: 48860 - DNA, 18 bp, Homo Sapiens
ggatggccgagcggtcta

SEQ ID NO: 48861 - DNA, 20 bp, Homo Sapiens
ggatggccgagcggtctaag

SEQ ID NO: 48862 - DNA, 22 bp, Homo Sapiens
ggatggccgagcggtctaaggc

SEQ ID NO: 48863 - DNA, 28 bp, Homo Sapiens
ggatggccgagcggtctaaggcgctgcg

SEQ ID NO: 48864 - DNA, 29 bp, Homo Sapiens
ggatggggtgtgataggtggcacggagaa

SEQ ID NO: 48865 - DNA, 30 bp, Homo Sapiens; identical to SEQ ID NO: 18074

SEQ ID NO: 48866 - DNA, 34 bp, Homo Sapiens; identical to SEQ ID NO: 18078

SEQ ID NO: 48867 - DNA, 16 bp, Homo Sapiens
ggattcggcgctctca

SEQ ID NO: 48868 - DNA, 18 bp, Homo Sapiens
ggattcggcgctctcacc

SEQ ID NO: 48869 - DNA, 21 bp, Homo Sapiens
ggattcggcgctctcaccgcc

SEQ ID NO: 48870 - DNA, 28 bp, Homo Sapiens
ggattcggcgctctcaccgccgcggccc

SEQ ID NO: 48871 - DNA, 23 bp, Homo Sapiens
ggattgtgggttcgagtcccatc

SEQ ID NO: 48872 - DNA, 31 bp, Homo Sapiens; identical to SEQ ID NO: 18115

SEQ ID NO: 48873 - DNA, 32 bp, Homo Sapiens; identical to SEQ ID NO: 18116

SEQ ID NO: 48874 - DNA, 16 bp, Homo Sapiens
ggcagagcatttgact

SEQ ID NO: 48875 - DNA, 31 bp, Homo Sapiens
ggcagagtggtgcagcggaagcgtgctgggc

SEQ ID NO: 48876 - DNA, 19 bp, Homo Sapiens
ggcagcgatggccgagtgg

SEQ ID NO: 48877 - DNA, 27 bp, Homo Sapiens
ggcatcagcctccggagctggggattg

SEQ ID NO: 48878 - DNA, 28 bp, Homo Sapiens
ggcatcagcctccggagctggggattgt

SEQ ID NO: 48879 - DNA, 32 bp, Homo Sapiens; identical to SEQ ID NO: 18136

SEQ ID NO: 48880 - DNA, 33 bp, Homo Sapiens; identical to SEQ ID NO: 18137

SEQ ID NO: 48881 - DNA, 19 bp, Homo Sapiens
ggcattggtggttcagtgg

SEQ ID NO: 48882 - DNA, 31 bp, Homo Sapiens; identical to SEQ ID NO: 38026

SEQ ID NO: 48883 - DNA, 32 bp, Homo Sapiens; identical to SEQ ID NO: 18142

SEQ ID NO: 48884 - DNA, 33 bp, Homo Sapiens; identical to SEQ ID NO: 18143

SEQ ID NO: 48885 - DNA, 32 bp, Homo Sapiens
ggccatgatcgtatagtggttagtactctgcg

SEQ ID NO: 48886 - DNA, 33 bp, Homo Sapiens; identical to SEQ ID NO: 18183

SEQ ID NO: 48887 - DNA, 34 bp, Homo Sapiens; identical to SEQ ID NO: 18184

SEQ ID NO: 48888 - DNA, 32 bp, Homo Sapiens; identical to SEQ ID NO: 18195

SEQ ID NO: 48889 - DNA, 33 bp, Homo Sapiens; identical to SEQ ID NO: 18196

SEQ ID NO: 48890 - DNA, 36 bp, Homo Sapiens; identical to SEQ ID NO: 18199

SEQ ID NO: 48891 - DNA, 40 bp, Homo Sapiens; identical to SEQ ID NO: 18201

SEQ ID NO: 48892 - DNA, 41 bp, Homo Sapiens; identical to SEQ ID NO: 18202

SEQ ID NO: 48893 - DNA, 31 bp, Homo Sapiens; identical to SEQ ID NO: 38039

SEQ ID NO: 48894 - DNA, 32 bp, Homo Sapiens; identical to SEQ ID NO: 18204

SEQ ID NO: 48895 - DNA, 31 bp, Homo Sapiens; identical to SEQ ID NO: 38040

SEQ ID NO: 48896 - DNA, 32 bp, Homo Sapiens
ggccccgggttcgatccccggcatctccacca

SEQ ID NO: 48897 - DNA, 18 bp, Homo Sapiens
ggcccgggttcgactccc

SEQ ID NO: 48898 - DNA, 27 bp, Homo Sapiens
ggcccgggttcgactcccggtgtggga

SEQ ID NO: 48899 - DNA, 28 bp, Homo Sapiens
ggcccgggttcgactcccggtgtgggaa

SEQ ID NO: 48900 - DNA, 29 bp, Homo Sapiens
ggcccgggttcgactcccggtgtgggaac

SEQ ID NO: 48901 - DNA, 30 bp, Homo Sapiens; identical to SEQ ID NO: 18208

SEQ ID NO: 48902 - DNA, 31 bp, Homo Sapiens; identical to SEQ ID NO: 18209

SEQ ID NO: 48903 - DNA, 29 bp, Homo Sapiens
ggcccgggttcgattcccggtcagggaac

SEQ ID NO: 48904 - DNA, 31 bp, Homo Sapiens
ggcccgggttcgattcccggtcagggaacca

SEQ ID NO: 48905 - DNA, 16 bp, Homo Sapiens
ggccgagcggtctaag

SEQ ID NO: 48906 - DNA, 21 bp, Homo Sapiens
ggccgcagcaacctcggttcg

SEQ ID NO: 48907 - DNA, 18 bp, Homo Sapiens
ggccgcgtggcctaatgg

SEQ ID NO: 48908 - DNA, 19 bp, Homo Sapiens
ggccgcgtggcctaatgga

SEQ ID NO: 48909 - DNA, 30 bp, Homo Sapiens; identical to SEQ ID NO: 18240

SEQ ID NO: 48910 - DNA, 33 bp, Homo Sapiens; identical to SEQ ID NO: 18241

SEQ ID NO: 48911 - DNA, 19 bp, Homo Sapiens
ggccggttagctcagttgg

SEQ ID NO: 48912 - DNA, 20 bp, Homo Sapiens
ggccggttagctcagttggt

SEQ ID NO: 48913 - DNA, 34 bp, Homo Sapiens; identical to SEQ ID NO: 18264

SEQ ID NO: 48914 - DNA, 16 bp, Homo Sapiens
ggccgtgatcgtatag

SEQ ID NO: 48915 - DNA, 17 bp, Homo Sapiens
ggccgtgatcgtatagt

SEQ ID NO: 48916 - DNA, 18 bp, Homo Sapiens
ggccgtgatcgtatagtg

SEQ ID NO: 48917 - DNA, 19 bp, Homo Sapiens
ggccgtgatcgtatagtgg

SEQ ID NO: 48918 - DNA, 20 bp, Homo Sapiens
ggccgtgatcgtatagtggt

SEQ ID NO: 48919 - DNA, 21 bp, Homo Sapiens
ggccgtgatcgtatagtggtt

SEQ ID NO: 48920 - DNA, 22 bp, Homo Sapiens
ggccgtgatcgtatagtggtta

SEQ ID NO: 48921 - DNA, 23 bp, Homo Sapiens
ggccgtgatcgtatagtggttag

SEQ ID NO: 48922 - DNA, 24 bp, Homo Sapiens
ggccgtgatcgtatagtggttagt

SEQ ID NO: 48923 - DNA, 25 bp, Homo Sapiens
ggccgtgatcgtatagtggttagta

SEQ ID NO: 48924 - DNA, 26 bp, Homo Sapiens
ggccgtgatcgtatagtggttagtac

SEQ ID NO: 48925 - DNA, 27 bp, Homo Sapiens
ggccgtgatcgtatagtggttagtact

SEQ ID NO: 48926 - DNA, 28 bp, Homo Sapiens
ggccgtgatcgtatagtggttagtactc

SEQ ID NO: 48927 - DNA, 29 bp, Homo Sapiens
ggccgtgatcgtatagtggttagtactct

SEQ ID NO: 48928 - DNA, 30 bp, Homo Sapiens; identical to SEQ ID NO: 18279

SEQ ID NO: 48929 - DNA, 31 bp, Homo Sapiens; identical to SEQ ID NO: 18280

SEQ ID NO: 48930 - DNA, 32 bp, Homo Sapiens; identical to SEQ ID NO: 18281

SEQ ID NO: 48931 - DNA, 33 bp, Homo Sapiens; identical to SEQ ID NO: 18282

SEQ ID NO: 48932 - DNA, 34 bp, Homo Sapiens; identical to SEQ ID NO: 18283

SEQ ID NO: 48933 - DNA, 35 bp, Homo Sapiens; identical to SEQ ID NO: 18284

SEQ ID NO: 48934 - DNA, 36 bp, Homo Sapiens; identical to SEQ ID NO: 18285

SEQ ID NO: 48935 - DNA, 37 bp, Homo Sapiens; identical to SEQ ID NO: 18286

SEQ ID NO: 48936 - DNA, 46 bp, Homo Sapiens
ggccgtgatcgtatagtggttagtactctgcgttgtggccgcagca

SEQ ID NO: 48937 - DNA, 18 bp, Homo Sapiens
ggcctcgtggcgcaacgg

SEQ ID NO: 48938 - DNA, 31 bp, Homo Sapiens; identical to SEQ ID NO: 18293

SEQ ID NO: 48939 - DNA, 32 bp, Homo Sapiens; identical to SEQ ID NO: 18294

SEQ ID NO: 48940 - DNA, 22 bp, Homo Sapiens
ggcgctctcaccgccgcggccc

SEQ ID NO: 48941 - DNA, 27 bp, Homo Sapiens
ggcgctctcaccgccgcggcccgggtt

SEQ ID NO: 48942 - DNA, 45 bp, Homo Sapiens; identical to SEQ ID NO: 38104

SEQ ID NO: 48943 - DNA, 46 bp, Homo Sapiens; identical to SEQ ID NO: 18316

SEQ ID NO: 48944 - DNA, 24 bp, Homo Sapiens
ggcggcccgggttcgactcccggt

SEQ ID NO: 48945 - DNA, 29 bp, Homo Sapiens
ggcggcccgggttcgactcccggtgtggg

SEQ ID NO: 48946 - DNA, 30 bp, Homo Sapiens; identical to SEQ ID NO: 18326

SEQ ID NO: 48947 - DNA, 31 bp, Homo Sapiens; identical to SEQ ID NO: 18327

SEQ ID NO: 48948 - DNA, 32 bp, Homo Sapiens; identical to SEQ ID NO: 18328

SEQ ID NO: 48949 - DNA, 33 bp, Homo Sapiens; identical to SEQ ID NO: 18329

SEQ ID NO: 48950 - DNA, 18 bp, Homo Sapiens
ggctagctcagtcggtag

SEQ ID NO: 48951 - DNA, 20 bp, Homo Sapiens
ggctagctcagtcggtagag

SEQ ID NO: 48952 - DNA, 29 bp, Homo Sapiens
ggctagctcagtcggtagagcatgagact

SEQ ID NO: 48953 - DNA, 30 bp, Homo Sapiens; identical to SEQ ID NO: 18355

SEQ ID NO: 48954 - DNA, 45 bp, Homo Sapiens; identical to SEQ ID NO: 38121

SEQ ID NO: 48955 - DNA, 28 bp, Homo Sapiens
ggctagctcagtcggtagagcatgggac

SEQ ID NO: 48956 - DNA, 29 bp, Homo Sapiens
ggctagctcagtcggtagagcatgggact

SEQ ID NO: 48957 - DNA, 30 bp, Homo Sapiens; identical to SEQ ID NO: 18370

SEQ ID NO: 48958 - DNA, 31 bp, Homo Sapiens; identical to SEQ ID NO: 18371

SEQ ID NO: 48959 - DNA, 32 bp, Homo Sapiens; identical to SEQ ID NO: 18372

SEQ ID NO: 48960 - DNA, 35 bp, Homo Sapiens; identical to SEQ ID NO: 18375

SEQ ID NO: 48961 - DNA, 37 bp, Homo Sapiens; identical to SEQ ID NO: 18377

SEQ ID NO: 48962 - DNA, 38 bp, Homo Sapiens; identical to SEQ ID NO: 18378

SEQ ID NO: 48963 - DNA, 45 bp, Homo Sapiens; identical to SEQ ID NO: 38127

SEQ ID NO: 48964 - DNA, 17 bp, Homo Sapiens
ggctccatagctcaggg

SEQ ID NO: 48965 - DNA, 18 bp, Homo Sapiens
ggctccatagctcagggg

SEQ ID NO: 48966 - DNA, 19 bp, Homo Sapiens
ggctccatagctcaggggt

SEQ ID NO: 48967 - DNA, 28 bp, Homo Sapiens
ggctccatagctcaggggttagagcact

SEQ ID NO: 48968 - DNA, 32 bp, Homo Sapiens; identical to SEQ ID NO: 18410

SEQ ID NO: 48969 - DNA, 33 bp, Homo Sapiens; identical to SEQ ID NO: 18411

SEQ ID NO: 48970 - DNA, 19 bp, Homo Sapiens
ggctccatagctcagtggt

SEQ ID NO: 48971 - DNA, 18 bp, Homo Sapiens
ggctccgtggcgcaatgg

SEQ ID NO: 48972 - DNA, 19 bp, Homo Sapiens
ggctccgtggcgcaatgga

SEQ ID NO: 48973 - DNA, 20 bp, Homo Sapiens
ggctccgtggcgcaatggat

SEQ ID NO: 48974 - DNA, 22 bp, Homo Sapiens
ggctccgtggcgcaatggatag

SEQ ID NO: 48975 - DNA, 27 bp, Homo Sapiens
ggctccgtggcgcaatggatagcgcat

SEQ ID NO: 48976 - DNA, 29 bp, Homo Sapiens
ggctccgtggcgcaatggatagcgcattg

SEQ ID NO: 48977 - DNA, 32 bp, Homo Sapiens; identical to SEQ ID NO: 18427

SEQ ID NO: 48978 - DNA, 33 bp, Homo Sapiens; identical to SEQ ID NO: 18428

SEQ ID NO: 48979 - DNA, 35 bp, Homo Sapiens; identical to SEQ ID NO: 18430

SEQ ID NO: 48980 - DNA, 36 bp, Homo Sapiens; identical to SEQ ID NO: 18431

SEQ ID NO: 48981 - DNA, 16 bp, Homo Sapiens
ggctcgttggtctagg

SEQ ID NO: 48982 - DNA, 17 bp, Homo Sapiens
ggctcgttggtctaggg

SEQ ID NO: 48983 - DNA, 18 bp, Homo Sapiens
ggctcgttggtctagggg

SEQ ID NO: 48984 - DNA, 20 bp, Homo Sapiens
ggctcgttggtctaggggta

SEQ ID NO: 48985 - DNA, 25 bp, Homo Sapiens
ggctcgttggtctaggggtatgatt

SEQ ID NO: 48986 - DNA, 26 bp, Homo Sapiens
ggctcgttggtctaggggtatgattc

SEQ ID NO: 48987 - DNA, 27 bp, Homo Sapiens
ggctcgttggtctaggggtatgattct

SEQ ID NO: 48988 - DNA, 28 bp, Homo Sapiens
ggctcgttggtctaggggtatgattctc

SEQ ID NO: 48989 - DNA, 29 bp, Homo Sapiens
ggctcgttggtctaggggtatgattctcg

SEQ ID NO: 48990 - DNA, 30 bp, Homo Sapiens; identical to SEQ ID NO: 18447

SEQ ID NO: 48991 - DNA, 31 bp, Homo Sapiens; identical to SEQ ID NO: 18448

SEQ ID NO: 48992 - DNA, 32 bp, Homo Sapiens; identical to SEQ ID NO: 18449

SEQ ID NO: 48993 - DNA, 33 bp, Homo Sapiens; identical to SEQ ID NO: 18450

SEQ ID NO: 48994 - DNA, 35 bp, Homo Sapiens; identical to SEQ ID NO: 18452

SEQ ID NO: 48995 - DNA, 33 bp, Homo Sapiens; identical to SEQ ID NO: 18454

SEQ ID NO: 48996 - DNA, 35 bp, Homo Sapiens; identical to SEQ ID NO: 18456

SEQ ID NO: 48997 - DNA, 30 bp, Homo Sapiens; identical to SEQ ID NO: 38166

SEQ ID NO: 48998 - DNA, 31 bp, Homo Sapiens; identical to SEQ ID NO: 18458

SEQ ID NO: 48999 - DNA, 32 bp, Homo Sapiens; identical to SEQ ID NO: 18459

SEQ ID NO: 49000 - DNA, 33 bp, Homo Sapiens; identical to SEQ ID NO: 18460

SEQ ID NO: 49001 - DNA, 34 bp, Homo Sapiens; identical to SEQ ID NO: 18461

SEQ ID NO: 49002 - DNA, 31 bp, Homo Sapiens; identical to SEQ ID NO: 18467

SEQ ID NO: 49003 - DNA, 32 bp, Homo Sapiens; identical to SEQ ID NO: 18468

SEQ ID NO: 49004 - DNA, 19 bp, Homo Sapiens
ggctctgtggcgcaatgga

SEQ ID NO: 49005 - DNA, 27 bp, Homo Sapiens
ggctctgtggcgcaatggatagcgcat

SEQ ID NO: 49006 - DNA, 32 bp, Homo Sapiens; identical to SEQ ID NO: 18474

SEQ ID NO: 49007 - DNA, 33 bp, Homo Sapiens; identical to SEQ ID NO: 18475

SEQ ID NO: 49008 - DNA, 23 bp, Homo Sapiens
ggctgttaaccgaaaggttggtg

SEQ ID NO: 49009 - DNA, 26 bp, Homo Sapiens
ggctgttaaccgaaaggttggtggtt

SEQ ID NO: 49010 - DNA, 29 bp, Homo Sapiens
gggactcttaatcccagggtcgtgggttc

SEQ ID NO: 49011 - DNA, 26 bp, Homo Sapiens
gggagaccggggttcaattccccgac

SEQ ID NO: 49012 - DNA, 30 bp, Homo Sapiens; identical to SEQ ID NO: 18507

SEQ ID NO: 49013 - DNA, 33 bp, Homo Sapiens; identical to SEQ ID NO: 18510

SEQ ID NO: 49014 - DNA, 34 bp, Homo Sapiens; identical to SEQ ID NO: 18511

SEQ ID NO: 49015 - DNA, 16 bp, Homo Sapiens
gggagaccggggttcg

SEQ ID NO: 49016 - DNA, 20 bp, Homo Sapiens
gggagaccggggttcgattc

SEQ ID NO: 49017 - DNA, 21 bp, Homo Sapiens
gggagaccggggttcgattcc

SEQ ID NO: 49018 - DNA, 26 bp, Homo Sapiens
gggagaccggggttcgattccccgac

SEQ ID NO: 49019 - DNA, 29 bp, Homo Sapiens
gggagaccggggttcgattccccgacggg

SEQ ID NO: 49020 - DNA, 30 bp, Homo Sapiens; identical to SEQ ID NO: 18519

SEQ ID NO: 49021 - DNA, 31 bp, Homo Sapiens; identical to SEQ ID NO: 18520

SEQ ID NO: 49022 - DNA, 32 bp, Homo Sapiens; identical to SEQ ID NO: 18521

SEQ ID NO: 49023 - DNA, 33 bp, Homo Sapiens; identical to SEQ ID NO: 18522

SEQ ID NO: 49024 - DNA, 34 bp, Homo Sapiens; identical to SEQ ID NO: 18523

SEQ ID NO: 49025 - DNA, 35 bp, Homo Sapiens; identical to SEQ ID NO: 18524

SEQ ID NO: 49026 - DNA, 25 bp, Homo Sapiens
gggaggcccgggttcgattcccggc

SEQ ID NO: 49027 - DNA, 16 bp, Homo Sapiens
gggatgggttcgattc

SEQ ID NO: 49028 - DNA, 18 bp, Homo Sapiens
gggatgggttcgattctc

SEQ ID NO: 49029 - DNA, 30 bp, Homo Sapiens; identical to SEQ ID NO: 18538

SEQ ID NO: 49030 - DNA, 17 bp, Homo Sapiens
gggatgtagctcagtgg

SEQ ID NO: 49031 - DNA, 21 bp, Homo Sapiens
gggatgtagctcagtggtaga

SEQ ID NO: 49032 - DNA, 22 bp, Homo Sapiens
gggatgtagctcagtggtagag

SEQ ID NO: 49033 - DNA, 21 bp, Homo Sapiens
gggattagctcaaatggtaga

SEQ ID NO: 49034 - DNA, 18 bp, Homo Sapiens
gggattgtgggttcgagt

SEQ ID NO: 49035 - DNA, 19 bp, Homo Sapiens
gggattgtgggttcgagtc

SEQ ID NO: 49036 - DNA, 20 bp, Homo Sapiens
gggattgtgggttcgagtcc

SEQ ID NO: 49037 - DNA, 21 bp, Homo Sapiens
gggattgtgggttcgagtccc

SEQ ID NO: 49038 - DNA, 22 bp, Homo Sapiens
gggattgtgggttcgagtccca

SEQ ID NO: 49039 - DNA, 24 bp, Homo Sapiens
gggattgtgggttcgagtcccacc

SEQ ID NO: 49040 - DNA, 28 bp, Homo Sapiens
gggattgtgggttcgagtcccacccggg

SEQ ID NO: 49041 - DNA, 29 bp, Homo Sapiens
gggattgtgggttcgagtcccacccgggg

SEQ ID NO: 49042 - DNA, 30 bp, Homo Sapiens; identical to SEQ ID NO: 18559

SEQ ID NO: 49043 - DNA, 31 bp, Homo Sapiens; identical to SEQ ID NO: 18560

SEQ ID NO: 49044 - DNA, 32 bp, Homo Sapiens
gggattgtgggttcgagtcccacccggggtac

SEQ ID NO: 49045 - DNA, 25 bp, Homo Sapiens
gggattgtgggttcgagtcccacct

SEQ ID NO: 49046 - DNA, 26 bp, Homo Sapiens
gggattgtgggttcgagtcccacctg

SEQ ID NO: 49047 - DNA, 29 bp, Homo Sapiens
gggattgtgggttcgagtcccacctgggg

SEQ ID NO: 49048 - DNA, 31 bp, Homo Sapiens
gggattgtgggttcgagtcccacctggggtg

SEQ ID NO: 49049 - DNA, 33 bp, Homo Sapiens
gggattgtgggttcgagtcccacctggggtgcc

SEQ ID NO: 49050 - DNA, 24 bp, Homo Sapiens
gggattgtgggttcgagtcccatc

SEQ ID NO: 49051 - DNA, 26 bp, Homo Sapiens
gggattgtgggttcgagtcccatctg

SEQ ID NO: 49052 - DNA, 28 bp, Homo Sapiens
gggattgtgggttcgagtcccatctggg

SEQ ID NO: 49053 - DNA, 29 bp, Homo Sapiens
gggattgtgggttcgagtcccatctgggg

SEQ ID NO: 49054 - DNA, 30 bp, Homo Sapiens
gggattgtgggttcgagtcccatctggggt

SEQ ID NO: 49055 - DNA, 31 bp, Homo Sapiens; identical to SEQ ID NO: 18565

SEQ ID NO: 49056 - DNA, 32 bp, Homo Sapiens; identical to SEQ ID NO: 18566

SEQ ID NO: 49057 - DNA, 33 bp, Homo Sapiens; identical to SEQ ID NO: 18567

SEQ ID NO: 49058 - DNA, 34 bp, Homo Sapiens; identical to SEQ ID NO: 18568

SEQ ID NO: 49059 - DNA, 33 bp, Homo Sapiens; identical to SEQ ID NO: 18570

SEQ ID NO: 49060 - DNA, 34 bp, Homo Sapiens; identical to SEQ ID NO: 18571

SEQ ID NO: 49061 - DNA, 19 bp, Homo Sapiens
gggccagtggcgcaatgga

SEQ ID NO: 49062 - DNA, 20 bp, Homo Sapiens
gggccagtggcgcaatggat

SEQ ID NO: 49063 - DNA, 24 bp, Homo Sapiens
gggccagtggcgcaatggataacg

SEQ ID NO: 49064 - DNA, 30 bp, Homo Sapiens
gggccagtggcgcaatggataacgcgtctg

SEQ ID NO: 49065 - DNA, 32 bp, Homo Sapiens; identical to SEQ ID NO: 18578

SEQ ID NO: 49066 - DNA, 33 bp, Homo Sapiens; identical to SEQ ID NO: 18579

SEQ ID NO: 49067 - DNA, 27 bp, Homo Sapiens
gggcccataacccagaggtcgatggat

SEQ ID NO: 49068 - DNA, 16 bp, Homo Sapiens
gggcccataccccgaa

SEQ ID NO: 49069 - DNA, 17 bp, Homo Sapiens
gggcccataccccgaaa

SEQ ID NO: 49070 - DNA, 18 bp, Homo Sapiens
gggcccataccccgaaaa

SEQ ID NO: 49071 - DNA, 26 bp, Homo Sapiens
gggcccataccccgaaaatgttggtt

SEQ ID NO: 49072 - DNA, 42 bp, Homo Sapiens; identical to SEQ ID NO: 18609

SEQ ID NO: 49073 - DNA, 45 bp, Homo Sapiens; identical to SEQ ID NO: 18612

SEQ ID NO: 49074 - DNA, 46 bp, Homo Sapiens; identical to SEQ ID NO: 18613

SEQ ID NO: 49075 - DNA, 32 bp, Homo Sapiens; identical to SEQ ID NO: 38252

SEQ ID NO: 49076 - DNA, 19 bp, Homo Sapiens
ggggaattagctcaaatgg

SEQ ID NO: 49077 - DNA, 20 bp, Homo Sapiens
ggggaattagctcaaatggt

SEQ ID NO: 49078 - DNA, 23 bp, Homo Sapiens
ggggaattagctcaaatggtaga

SEQ ID NO: 49079 - DNA, 32 bp, Homo Sapiens; identical to SEQ ID NO: 18633

SEQ ID NO: 49080 - DNA, 33 bp, Homo Sapiens; identical to SEQ ID NO: 18634

SEQ ID NO: 49081 - DNA, 16 bp, Homo Sapiens
ggggatgtagctcagt

SEQ ID NO: 49082 - DNA, 17 bp, Homo Sapiens
ggggatgtagctcagtg

SEQ ID NO: 49083 - DNA, 18 bp, Homo Sapiens
ggggatgtagctcagtgg

SEQ ID NO: 49084 - DNA, 19 bp, Homo Sapiens
ggggatgtagctcagtggt

SEQ ID NO: 49085 - DNA, 20 bp, Homo Sapiens
ggggatgtagctcagtggta

SEQ ID NO: 49086 - DNA, 21 bp, Homo Sapiens
ggggatgtagctcagtggtag

SEQ ID NO: 49087 - DNA, 22 bp, Homo Sapiens
ggggatgtagctcagtggtaga

SEQ ID NO: 49088 - DNA, 23 bp, Homo Sapiens
ggggatgtagctcagtggtagag

SEQ ID NO: 49089 - DNA, 24 bp, Homo Sapiens
ggggatgtagctcagtggtagagc

SEQ ID NO: 49090 - DNA, 26 bp, Homo Sapiens
ggggatgtagctcagtggtagagcgc

SEQ ID NO: 49091 - DNA, 27 bp, Homo Sapiens
ggggatgtagctcagtggtagagcgca

SEQ ID NO: 49092 - DNA, 28 bp, Homo Sapiens
ggggatgtagctcagtggtagagcgcat

SEQ ID NO: 49093 - DNA, 30 bp, Homo Sapiens; identical to SEQ ID NO: 18649

SEQ ID NO: 49094 - DNA, 31 bp, Homo Sapiens; identical to SEQ ID NO: 18650

SEQ ID NO: 49095 - DNA, 32 bp, Homo Sapiens; identical to SEQ ID NO: 18651

SEQ ID NO: 49096 - DNA, 43 bp, Homo Sapiens
ggggatgtagctcagtggtagagcgcatgctttgcacgtatga

SEQ ID NO: 49097 - DNA, 27 bp, Homo Sapiens
ggggatgtagctcagtggtagagcgcg

SEQ ID NO: 49098 - DNA, 28 bp, Homo Sapiens
ggggatgtagctcagtggtagagcgcgc

SEQ ID NO: 49099 - DNA, 29 bp, Homo Sapiens
ggggatgtagctcagtggtagagcgcgcg

SEQ ID NO: 49100 - DNA, 30 bp, Homo Sapiens; identical to SEQ ID NO: 18658

SEQ ID NO: 49101 - DNA, 31 bp, Homo Sapiens; identical to SEQ ID NO: 18659

SEQ ID NO: 49102 - DNA, 32 bp, Homo Sapiens; identical to SEQ ID NO: 18660

SEQ ID NO: 49103 - DNA, 35 bp, Homo Sapiens; identical to SEQ ID NO: 18663

SEQ ID NO: 49104 - DNA, 16 bp, Homo Sapiens
ggggattgtgggttcg

SEQ ID NO: 49105 - DNA, 20 bp, Homo Sapiens
ggggattgtgggttcgagtc

SEQ ID NO: 49106 - DNA, 21 bp, Homo Sapiens
ggggattgtgggttcgagtcc

SEQ ID NO: 49107 - DNA, 22 bp, Homo Sapiens
ggggattgtgggttcgagtccc

SEQ ID NO: 49108 - DNA, 23 bp, Homo Sapiens
ggggattgtgggttcgagtccca

SEQ ID NO: 49109 - DNA, 25 bp, Homo Sapiens
ggggattgtgggttcgagtcccatc

SEQ ID NO: 49110 - DNA, 31 bp, Homo Sapiens; identical to SEQ ID NO: 18671

SEQ ID NO: 49111 - DNA, 32 bp, Homo Sapiens; identical to SEQ ID NO: 18672

SEQ ID NO: 49112 - DNA, 34 bp, Homo Sapiens; identical to SEQ ID NO: 18674

SEQ ID NO: 49113 - DNA, 35 bp, Homo Sapiens; identical to SEQ ID NO: 18675

SEQ ID NO: 49114 - DNA, 16 bp, Homo Sapiens
gggggattagctcaaa

SEQ ID NO: 49115 - DNA, 19 bp, Homo Sapiens
gggggattagctcaaatgg

SEQ ID NO: 49116 - DNA, 20 bp, Homo Sapiens
gggggattagctcaaatggt

SEQ ID NO: 49117 - DNA, 23 bp, Homo Sapiens
gggggattagctcaaatggtaga

SEQ ID NO: 49118 - DNA, 25 bp, Homo Sapiens
gggggattagctcaaatggtagagc

SEQ ID NO: 49119 - DNA, 29 bp, Homo Sapiens
gggggattagctcaaatggtagagcgctc

SEQ ID NO: 49120 - DNA, 31 bp, Homo Sapiens; identical to SEQ ID NO: 18691

SEQ ID NO: 49121 - DNA, 32 bp, Homo Sapiens; identical to SEQ ID NO: 18692

SEQ ID NO: 49122 - DNA, 33 bp, Homo Sapiens; identical to SEQ ID NO: 18693

SEQ ID NO: 49123 - DNA, 24 bp, Homo Sapiens
gggggcatagctcagtggtagagc

SEQ ID NO: 49124 - DNA, 25 bp, Homo Sapiens
gggggcatagctcagtggtagagca

SEQ ID NO: 49125 - DNA, 26 bp, Homo Sapiens
gggggcatagctcagtggtagagcat

SEQ ID NO: 49126 - DNA, 32 bp, Homo Sapiens; identical to SEQ ID NO: 18700

SEQ ID NO: 49127 - DNA, 33 bp, Homo Sapiens; identical to SEQ ID NO: 18701

SEQ ID NO: 49128 - DNA, 34 bp, Homo Sapiens; identical to SEQ ID NO: 18702

SEQ ID NO: 49129 - DNA, 16 bp, Homo Sapiens
gggggtatagctcagc

SEQ ID NO: 49130 - DNA, 17 bp, Homo Sapiens
gggggtatagctcaggg

SEQ ID NO: 49131 - DNA, 18 bp, Homo Sapiens
gggggtatagctcagggg

SEQ ID NO: 49132 - DNA, 24 bp, Homo Sapiens
gggggtatagctcaggggtagagc

SEQ ID NO: 49133 - DNA, 25 bp, Homo Sapiens
gggggtatagctcaggggtagagca

SEQ ID NO: 49134 - DNA, 32 bp, Homo Sapiens; identical to SEQ ID NO: 18715

SEQ ID NO: 49135 - DNA, 26 bp, Homo Sapiens
gggggtatagctcaggggtagagcat

SEQ ID NO: 49136 - DNA, 27 bp, Homo Sapiens
gggggtatagctcaggggtagagcatt

SEQ ID NO: 49137 - DNA, 31 bp, Homo Sapiens; identical to SEQ ID NO: 18723

SEQ ID NO: 49138 - DNA, 32 bp, Homo Sapiens; identical to SEQ ID NO: 18724

SEQ ID NO: 49139 - DNA, 33 bp, Homo Sapiens; identical to SEQ ID NO: 18725

SEQ ID NO: 49140 - DNA, 34 bp, Homo Sapiens; identical to SEQ ID NO: 18726

SEQ ID NO: 49141 - DNA, 33 bp, Homo Sapiens; identical to SEQ ID NO: 18729

SEQ ID NO: 49142 - DNA, 35 bp, Homo Sapiens; identical to SEQ ID NO: 18731

SEQ ID NO: 49143 - DNA, 18 bp, Homo Sapiens
gggggtatagctcagtgg

SEQ ID NO: 49144 - DNA, 19 bp, Homo Sapiens
gggggtatagctcagtggg

SEQ ID NO: 49145 - DNA, 33 bp, Homo Sapiens; identical to SEQ ID NO: 18737

SEQ ID NO: 49146 - DNA, 34 bp, Homo Sapiens; identical to SEQ ID NO: 18738

SEQ ID NO: 49147 - DNA, 35 bp, Homo Sapiens; identical to SEQ ID NO: 18739

SEQ ID NO: 49148 - DNA, 19 bp, Homo Sapiens
gggggtatagctcagtggt

SEQ ID NO: 49149 - DNA, 22 bp, Homo Sapiens
gggggtatagctcagtggtaga

SEQ ID NO: 49150 - DNA, 24 bp, Homo Sapiens
gggggtatagctcagtggtagagc

SEQ ID NO: 49151 - DNA, 25 bp, Homo Sapiens
gggggtatagctcagtggtagagca

SEQ ID NO: 49152 - DNA, 26 bp, Homo Sapiens
gggggtatagctcagtggtagagcat

SEQ ID NO: 49153 - DNA, 27 bp, Homo Sapiens
gggggtatagctcagtggtagagcatt

SEQ ID NO: 49154 - DNA, 29 bp, Homo Sapiens
gggggtatagctcagtggtagagcatttg

SEQ ID NO: 49155 - DNA, 30 bp, Homo Sapiens; identical to SEQ ID NO: 18752

SEQ ID NO: 49156 - DNA, 31 bp, Homo Sapiens; identical to SEQ ID NO: 18753

SEQ ID NO: 49157 - DNA, 32 bp, Homo Sapiens; identical to SEQ ID NO: 18754

SEQ ID NO: 49158 - DNA, 33 bp, Homo Sapiens; identical to SEQ ID NO: 18755

SEQ ID NO: 49159 - DNA, 34 bp, Homo Sapiens; identical to SEQ ID NO: 18756

SEQ ID NO: 49160 - DNA, 35 bp, Homo Sapiens; identical to SEQ ID NO: 18757

SEQ ID NO: 49161 - DNA, 30 bp, Homo Sapiens; identical to SEQ ID NO: 38342

SEQ ID NO: 49162 - DNA, 31 bp, Homo Sapiens; identical to SEQ ID NO: 38343

SEQ ID NO: 49163 - DNA, 32 bp, Homo Sapiens; identical to SEQ ID NO: 18765

SEQ ID NO: 49164 - DNA, 34 bp, Homo Sapiens; identical to SEQ ID NO: 18767

SEQ ID NO: 49165 - DNA, 25 bp, Homo Sapiens
gggggtcgattccccgacggggagc

SEQ ID NO: 49166 - DNA, 26 bp, Homo Sapiens
gggggtcgattccccgacggggagcc

SEQ ID NO: 49167 - DNA, 16 bp, Homo Sapiens
gggggtgtagctcagt

SEQ ID NO: 49168 - DNA, 17 bp, Homo Sapiens
gggggtgtagctcagtg

SEQ ID NO: 49169 - DNA, 18 bp, Homo Sapiens
gggggtgtagctcagtgg

SEQ ID NO: 49170 - DNA, 19 bp, Homo Sapiens
gggggtgtagctcagtggt

SEQ ID NO: 49171 - DNA, 20 bp, Homo Sapiens
gggggtgtagctcagtggta

SEQ ID NO: 49172 - DNA, 21 bp, Homo Sapiens
gggggtgtagctcagtggtag

SEQ ID NO: 49173 - DNA, 22 bp, Homo Sapiens
gggggtgtagctcagtggtaga

SEQ ID NO: 49174 - DNA, 23 bp, Homo Sapiens
gggggtgtagctcagtggtagag

SEQ ID NO: 49175 - DNA, 24 bp, Homo Sapiens
gggggtgtagctcagtggtagagc

SEQ ID NO: 49176 - DNA, 32 bp, Homo Sapiens; identical to SEQ ID NO: 18789

SEQ ID NO: 49177 - DNA, 33 bp, Homo Sapiens; identical to SEQ ID NO: 18790

SEQ ID NO: 49178 - DNA, 26 bp, Homo Sapiens
gggggtgtagctcagtggtagagcgc

SEQ ID NO: 49179 - DNA, 28 bp, Homo Sapiens
gggggtgtagctcagtggtagagcgcat

SEQ ID NO: 49180 - DNA, 31 bp, Homo Sapiens; identical to SEQ ID NO: 18794

SEQ ID NO: 49181 - DNA, 32 bp, Homo Sapiens; identical to SEQ ID NO: 18795

SEQ ID NO: 49182 - DNA, 27 bp, Homo Sapiens
gggggtgtagctcagtggtagagcgcg

SEQ ID NO: 49183 - DNA, 28 bp, Homo Sapiens
gggggtgtagctcagtggtagagcgcgt

SEQ ID NO: 49184 - DNA, 29 bp, Homo Sapiens
gggggtgtagctcagtggtagagcgcgtg

SEQ ID NO: 49185 - DNA, 30 bp, Homo Sapiens; identical to SEQ ID NO: 18801

SEQ ID NO: 49186 - DNA, 31 bp, Homo Sapiens; identical to SEQ ID NO: 18802

SEQ ID NO: 49187 - DNA, 32 bp, Homo Sapiens; identical to SEQ ID NO: 18803

SEQ ID NO: 49188 - DNA, 33 bp, Homo Sapiens; identical to SEQ ID NO: 18805

SEQ ID NO: 49189 - DNA, 33 bp, Homo Sapiens; identical to SEQ ID NO: 18820

SEQ ID NO: 49190 - DNA, 16 bp, Homo Sapiens
ggggtatgattctcgc

SEQ ID NO: 49191 - DNA, 17 bp, Homo Sapiens
ggggtatgattctcgct

SEQ ID NO: 49192 - DNA, 18 bp, Homo Sapiens
ggggtatgattctcgctt

SEQ ID NO: 49193 - DNA, 16 bp, Homo Sapiens
ggggtatgattctcgg

SEQ ID NO: 49194 - DNA, 17 bp, Homo Sapiens
ggggtatgattctcggt

SEQ ID NO: 49195 - DNA, 18 bp, Homo Sapiens
ggggtatgattctcggtt

SEQ ID NO: 49196 - DNA, 24 bp, Homo Sapiens
ggggtcgattccccgacggggagc

SEQ ID NO: 49197 - DNA, 25 bp, Homo Sapiens
ggggtcgattccccgacggggagcc

SEQ ID NO: 49198 - DNA, 26 bp, Homo Sapiens
ggggtcgattccccgacggggagcca

SEQ ID NO: 49199 - DNA, 32 bp, Homo Sapiens; identical to SEQ ID NO: 18838

SEQ ID NO: 49200 - DNA, 32 bp, Homo Sapiens; identical to SEQ ID NO: 38395

SEQ ID NO: 49201 - DNA, 32 bp, Homo Sapiens; identical to SEQ ID NO: 38396

SEQ ID NO: 49202 - DNA, 17 bp, Homo Sapiens
ggggtgtagctcagtgg

SEQ ID NO: 49203 - DNA, 25 bp, Homo Sapiens
ggggtgtgataggtggcacggagaa

SEQ ID NO: 49204 - DNA, 24 bp, Homo Sapiens
ggggttcaattccccgacggggag

SEQ ID NO: 49205 - DNA, 25 bp, Homo Sapiens
ggggttcaattccccgacggggagc

SEQ ID NO: 49206 - DNA, 26 bp, Homo Sapiens
ggggttcaattccccgacggggagcc

SEQ ID NO: 49207 - DNA, 27 bp, Homo Sapiens
ggggttcaattccccgacggggagcca

SEQ ID NO: 49208 - DNA, 25 bp, Homo Sapiens
ggggttcgattccccaacggggagc

SEQ ID NO: 49209 - DNA, 22 bp, Homo Sapiens
ggggttcgattccccgacgggg

SEQ ID NO: 49210 - DNA, 23 bp, Homo Sapiens
ggggttcgattccccgacgggga

SEQ ID NO: 49211 - DNA, 24 bp, Homo Sapiens
ggggttcgattccccgacggggag

SEQ ID NO: 49212 - DNA, 25 bp, Homo Sapiens
ggggttcgattccccgacggggagc

SEQ ID NO: 49213 - DNA, 26 bp, Homo Sapiens
ggggttcgattccccgacggggagcc

SEQ ID NO: 49214 - DNA, 27 bp, Homo Sapiens
ggggttcgattccccgacggggagcca

SEQ ID NO: 49215 - DNA, 16 bp, Homo Sapiens
gggtagctcagtcggt

SEQ ID NO: 49216 - DNA, 22 bp, Homo Sapiens
gggtatagctcagcggtagagc

SEQ ID NO: 49217 - DNA, 16 bp, Homo Sapiens
gggtatagctcagggg

SEQ ID NO: 49218 - DNA, 30 bp, Homo Sapiens; identical to SEQ ID NO: 18884

SEQ ID NO: 49219 - DNA, 16 bp, Homo Sapiens
gggtatagctcagtgg

SEQ ID NO: 49220 - DNA, 32 bp, Homo Sapiens; identical to SEQ ID NO: 18903

SEQ ID NO: 49221 - DNA, 16 bp, Homo Sapiens
gggtatgattctcgct

SEQ ID NO: 49222 - DNA, 17 bp, Homo Sapiens
gggtatgattctcgctt

SEQ ID NO: 49223 - DNA, 16 bp, Homo Sapiens
gggtatgattctcggt

SEQ ID NO: 49224 - DNA, 17 bp, Homo Sapiens
gggtatgattctcggtt

SEQ ID NO: 49225 - DNA, 28 bp, Homo Sapiens
gggtatgattctcggtttgggtccgaga

SEQ ID NO: 49226 - DNA, 29 bp, Homo Sapiens
gggtccagggttcaagtccctgttcgggc

SEQ ID NO: 49227 - DNA, 30 bp, Homo Sapiens; identical to SEQ ID NO: 18925

SEQ ID NO: 49228 - DNA, 31 bp, Homo Sapiens; identical to SEQ ID NO: 18926

SEQ ID NO: 49229 - DNA, 33 bp, Homo Sapiens; identical to SEQ ID NO: 18928

SEQ ID NO: 49230 - DNA, 23 bp, Homo Sapiens
gggtcgattccccgacggggagc

SEQ ID NO: 49231 - DNA, 20 bp, Homo Sapiens
gggtcgtgggttcgagcccc

SEQ ID NO: 49232 - DNA, 29 bp, Homo Sapiens
gggtcgtgggttcgagccccacgttgggc

SEQ ID NO: 49233 - DNA, 30 bp, Homo Sapiens; identical to SEQ ID NO: 18937

SEQ ID NO: 49234 - DNA, 31 bp, Homo Sapiens; identical to SEQ ID NO: 18938

SEQ ID NO: 49235 - DNA, 18 bp, Homo Sapiens
gggtctccccgcgcaggt

SEQ ID NO: 49236 - DNA, 20 bp, Homo Sapiens
gggtgcgagaggtcccgggt

SEQ ID NO: 49237 - DNA, 21 bp, Homo Sapiens
gggtgcgagaggtcccgggtt

SEQ ID NO: 49238 - DNA, 27 bp, Homo Sapiens
gggtggttcagtggtagaattctcgcc

SEQ ID NO: 49239 - DNA, 28 bp, Homo Sapiens
gggtggttcagtggtagaattctcgcct

SEQ ID NO: 49240 - DNA, 16 bp, Homo Sapiens
gggtgtagctcagtgg

SEQ ID NO: 49241 - DNA, 28 bp, Homo Sapiens
gggtgtagctcagtggtagagcgcgtgc

SEQ ID NO: 49242 - DNA, 16 bp, Homo Sapiens
gggtgtgataggtggc

SEQ ID NO: 49243 - DNA, 17 bp, Homo Sapiens
gggtgtgataggtggca

SEQ ID NO: 49244 - DNA, 24 bp, Homo Sapiens
gggtgtgataggtggcacggagaa

SEQ ID NO: 49245 - DNA, 17 bp, Homo Sapiens
gggttagagcactggtc

SEQ ID NO: 49246 - DNA, 23 bp, Homo Sapiens
gggttaggcctctttttaccacc

SEQ ID NO: 49247 - DNA, 22 bp, Homo Sapiens
gggttcaagtccctgttcgggc

SEQ ID NO: 49248 - DNA, 23 bp, Homo Sapiens
gggttcaagtccctgttcgggcg

SEQ ID NO: 49249 - DNA, 24 bp, Homo Sapiens
gggttcaagtccctgttcgggcgc

SEQ ID NO: 49250 - DNA, 25 bp, Homo Sapiens
gggttcaagtccctgttcgggcgcc

SEQ ID NO: 49251 - DNA, 25 bp, Homo Sapiens
gggttcaatccccggcacctccacc

SEQ ID NO: 49252 - DNA, 26 bp, Homo Sapiens
gggttcaatccccggcacctccacca

SEQ ID NO: 49253 - DNA, 19 bp, Homo Sapiens
gggttcaatccccggcatc

SEQ ID NO: 49254 - DNA, 22 bp, Homo Sapiens
gggttcaatccccggcatctcc

SEQ ID NO: 49255 - DNA, 24 bp, Homo Sapiens
gggttcaattccccgacggggagc

SEQ ID NO: 49256 - DNA, 25 bp, Homo Sapiens
gggttcaattccccgacggggagcc

SEQ ID NO: 49257 - DNA, 23 bp, Homo Sapiens
gggttcgaaccccgtccgtgcct

SEQ ID NO: 49258 - DNA, 25 bp, Homo Sapiens
gggttcgaatcccaccgctgccacc

SEQ ID NO: 49259 - DNA, 23 bp, Homo Sapiens
gggttcgaatcccagcggtgcct

SEQ ID NO: 49260 - DNA, 25 bp, Homo Sapiens
gggttcgaatcccatcctcgtcgcc

SEQ ID NO: 49261 - DNA, 17 bp, Homo Sapiens
gggttcgacccccggct

SEQ ID NO: 49262 - DNA, 23 bp, Homo Sapiens
gggttcgactcccggtatgggaa

SEQ ID NO: 49263 - DNA, 24 bp, Homo Sapiens
gggttcgactcccggtatgggaac

SEQ ID NO: 49264 - DNA, 25 bp, Homo Sapiens
gggttcgactcccggtatgggaacc

SEQ ID NO: 49265 - DNA, 17 bp, Homo Sapiens
gggttcgactcccggtg

SEQ ID NO: 49266 - DNA, 20 bp, Homo Sapiens
gggttcgactcccggtgtgg

SEQ ID NO: 49267 - DNA, 21 bp, Homo Sapiens
gggttcgactcccggtgtggg

SEQ ID NO: 49268 - DNA, 22 bp, Homo Sapiens
gggttcgactcccggtgtggga

SEQ ID NO: 49269 - DNA, 23 bp, Homo Sapiens
gggttcgactcccggtgtgggaa

SEQ ID NO: 49270 - DNA, 24 bp, Homo Sapiens
gggttcgactcccggtgtgggaac

SEQ ID NO: 49271 - DNA, 25 bp, Homo Sapiens
gggttcgactcccggtgtgggaacc

SEQ ID NO: 49272 - DNA, 26 bp, Homo Sapiens
gggttcgactcccggtgtgggaacca

SEQ ID NO: 49273 - DNA, 25 bp, Homo Sapiens
gggttcgagccccagtggaaccacc

SEQ ID NO: 49274 - DNA, 25 bp, Homo Sapiens
gggttcgagtcccatctggggtgcc

SEQ ID NO: 49275 - DNA, 24 bp, Homo Sapiens
gggttcgagtcccttcgtggtcgc

SEQ ID NO: 49276 - DNA, 25 bp, Homo Sapiens
gggttcgagtcccttcgtggtcgcc

SEQ ID NO: 49277 - DNA, 16 bp, Homo Sapiens
gggttcgatccccggc

SEQ ID NO: 49278 - DNA, 22 bp, Homo Sapiens
gggttcgatccccggcatctcc

SEQ ID NO: 49279 - DNA, 24 bp, Homo Sapiens
gggttcgatccccggcatctccac

SEQ ID NO: 49280 - DNA, 21 bp, Homo Sapiens
gggttcgatccccgtacgggc

SEQ ID NO: 49281 - DNA, 24 bp, Homo Sapiens
gggttcgattccccaacggggagc

SEQ ID NO: 49282 - DNA, 20 bp, Homo Sapiens
gggttcgattccccgacggg

SEQ ID NO: 49283 - DNA, 21 bp, Homo Sapiens
gggttcgattccccgacgggg

SEQ ID NO: 49284 - DNA, 22 bp, Homo Sapiens
gggttcgattccccgacgggga

SEQ ID NO: 49285 - DNA, 23 bp, Homo Sapiens
gggttcgattccccgacggggag

SEQ ID NO: 49286 - DNA, 24 bp, Homo Sapiens
gggttcgattccccgacggggagc

SEQ ID NO: 49287 - DNA, 25 bp, Homo Sapiens
gggttcgattccccgacggggagcc

SEQ ID NO: 49288 - DNA, 26 bp, Homo Sapiens
gggttcgattccccgacggggagcca

SEQ ID NO: 49289 - DNA, 17 bp, Homo Sapiens
gggttcgattcccggcc

SEQ ID NO: 49290 - DNA, 24 bp, Homo Sapiens
gggttcgattcccggccagggaac

SEQ ID NO: 49291 - DNA, 20 bp, Homo Sapiens
gggttcgattcccgggcggc

SEQ ID NO: 49292 - DNA, 24 bp, Homo Sapiens
gggttcgattcccgggcggcgcac

SEQ ID NO: 49293 - DNA, 20 bp, Homo Sapiens
gggttcgattcccggtcagg

SEQ ID NO: 49294 - DNA, 21 bp, Homo Sapiens
gggttcgattcccggtcaggg

SEQ ID NO: 49295 - DNA, 22 bp, Homo Sapiens
gggttcgattcccggtcaggga

SEQ ID NO: 49296 - DNA, 23 bp, Homo Sapiens
gggttcgattcccggtcagggaa

SEQ ID NO: 49297 - DNA, 24 bp, Homo Sapiens
gggttcgattcccggtcagggaac

SEQ ID NO: 49298 - DNA, 25 bp, Homo Sapiens
gggttcgattcccggtcagggaacc

SEQ ID NO: 49299 - DNA, 26 bp, Homo Sapiens
gggttcgattcccggtcagggaacca

SEQ ID NO: 49300 - DNA, 24 bp, Homo Sapiens
gggttcgattcccggtcatggaac

SEQ ID NO: 49301 - DNA, 18 bp, Homo Sapiens
gggtttccccgcgcaggt

SEQ ID NO: 49302 - DNA, 28 bp, Homo Sapiens
ggtaaaatggctgagtgaagcattggac

SEQ ID NO: 49303 - DNA, 29 bp, Homo Sapiens
ggtaaaatggctgagtgaagcattggact

SEQ ID NO: 49304 - DNA, 30 bp, Homo Sapiens; identical to SEQ ID NO: 19118

SEQ ID NO: 49305 - DNA, 31 bp, Homo Sapiens; identical to SEQ ID NO: 19119

SEQ ID NO: 49306 - DNA, 32 bp, Homo Sapiens; identical to SEQ ID NO: 19120

SEQ ID NO: 49307 - DNA, 33 bp, Homo Sapiens; identical to SEQ ID NO: 19121

SEQ ID NO: 49308 - DNA, 36 bp, Homo Sapiens; identical to SEQ ID NO: 19124

SEQ ID NO: 49309 - DNA, 37 bp, Homo Sapiens; identical to SEQ ID NO: 19125

SEQ ID NO: 49310 - DNA, 38 bp, Homo Sapiens; identical to SEQ ID NO: 19143

SEQ ID NO: 49311 - DNA, 16 bp, Homo Sapiens
ggtagaattctcgcct

SEQ ID NO: 49312 - DNA, 17 bp, Homo Sapiens
ggtagaattctcgcctg

SEQ ID NO: 49313 - DNA, 18 bp, Homo Sapiens
ggtagaattctcgcctgc

SEQ ID NO: 49314 - DNA, 19 bp, Homo Sapiens
ggtagaattctcgcctgcc

SEQ ID NO: 49315 - DNA, 27 bp, Homo Sapiens
ggtagaattctcgcctgccacgcggga

SEQ ID NO: 49316 - DNA, 31 bp, Homo Sapiens; identical to SEQ ID NO: 19193

SEQ ID NO: 49317 - DNA, 32 bp, Homo Sapiens; identical to SEQ ID NO: 19194

SEQ ID NO: 49318 - DNA, 33 bp, Homo Sapiens; identical to SEQ ID NO: 19195

SEQ ID NO: 49319 - DNA, 34 bp, Homo Sapiens; identical to SEQ ID NO: 19196

SEQ ID NO: 49320 - DNA, 36 bp, Homo Sapiens; identical to SEQ ID NO: 19198

SEQ ID NO: 49321 - DNA, 16 bp, Homo Sapiens
ggtagagcatcagact

SEQ ID NO: 49322 - DNA, 16 bp, Homo Sapiens
ggtagagcatgagact

SEQ ID NO: 49323 - DNA, 17 bp, Homo Sapiens
ggtagagcatgagactc

SEQ ID NO: 49324 - DNA, 25 bp, Homo Sapiens
ggtagagcatgagactcttaatctc

SEQ ID NO: 49325 - DNA, 38 bp, Homo Sapiens; identical to SEQ ID NO: 19223

SEQ ID NO: 49326 - DNA, 16 bp, Homo Sapiens
ggtagagcatgggact

SEQ ID NO: 49327 - DNA, 17 bp, Homo Sapiens
ggtagagcatgggactc

SEQ ID NO: 49328 - DNA, 23 bp, Homo Sapiens
ggtagagcatgggactcttaatc

SEQ ID NO: 49329 - DNA, 24 bp, Homo Sapiens
ggtagagcatgggactcttaatcc

SEQ ID NO: 49330 - DNA, 25 bp, Homo Sapiens
ggtagagcatgggactcttaatccc

SEQ ID NO: 49331 - DNA, 34 bp, Homo Sapiens; identical to SEQ ID NO: 19239

SEQ ID NO: 49332 - DNA, 35 bp, Homo Sapiens; identical to SEQ ID NO: 19240

SEQ ID NO: 49333 - DNA, 38 bp, Homo Sapiens; identical to SEQ ID NO: 19242

SEQ ID NO: 49334 - DNA, 16 bp, Homo Sapiens
ggtagagcatttgact

SEQ ID NO: 49335 - DNA, 18 bp, Homo Sapiens
ggtagagcatttgactgc

SEQ ID NO: 49336 - DNA, 16 bp, Homo Sapiens
ggtagcgcgtctgact

SEQ ID NO: 49337 - DNA, 16 bp, Homo Sapiens
ggtagcgtggccgagc

SEQ ID NO: 49338 - DNA, 18 bp, Homo Sapiens
ggtagcgtggccgagcgg

SEQ ID NO: 49339 - DNA, 20 bp, Homo Sapiens
ggtagcgtggccgagcggtc

SEQ ID NO: 49340 - DNA, 21 bp, Homo Sapiens
ggtagcgtggccgagcggtct

SEQ ID NO: 49341 - DNA, 22 bp, Homo Sapiens
ggtagcgtggccgagcggtcta

SEQ ID NO: 49342 - DNA, 24 bp, Homo Sapiens
ggtagcgtggccgagcggtctaag

SEQ ID NO: 49343 - DNA, 25 bp, Homo Sapiens
ggtagcgtggccgagcggtctaagg

SEQ ID NO: 49344 - DNA, 26 bp, Homo Sapiens
ggtagcgtggccgagcggtctaaggc

SEQ ID NO: 49345 - DNA, 29 bp, Homo Sapiens
ggtagcgtggccgagcggtctaaggcgct

SEQ ID NO: 49346 - DNA, 34 bp, Homo Sapiens; identical to SEQ ID NO: 19268

SEQ ID NO: 49347 - DNA, 16 bp, Homo Sapiens
ggtagcgtggccgagt

SEQ ID NO: 49348 - DNA, 18 bp, Homo Sapiens
ggtagcgtggccgagtgg

SEQ ID NO: 49349 - DNA, 19 bp, Homo Sapiens
ggtagcgtggccgagtggt

SEQ ID NO: 49350 - DNA, 21 bp, Homo Sapiens
ggtagcgtggccgagtggtct

SEQ ID NO: 49351 - DNA, 26 bp, Homo Sapiens
ggtagcgtggccgagtggtctaaggc

SEQ ID NO: 49352 - DNA, 28 bp, Homo Sapiens
ggtagcgtggccgagtggtctaaggcgc

SEQ ID NO: 49353 - DNA, 32 bp, Homo Sapiens
ggtagcgtggccgagtggtctaaggcgctgga

SEQ ID NO: 49354 - DNA, 34 bp, Homo Sapiens; identical to SEQ ID NO: 19282

SEQ ID NO: 49355 - DNA, 35 bp, Homo Sapiens; identical to SEQ ID NO: 19283

SEQ ID NO: 49356 - DNA, 16 bp, Homo Sapiens
ggtagtgtggccgagc

SEQ ID NO: 49357 - DNA, 22 bp, Homo Sapiens
ggtagtgtggccgagcggtcta

SEQ ID NO: 49358 - DNA, 26 bp, Homo Sapiens
ggtagtgtggccgagcggtctaaggc

SEQ ID NO: 49359 - DNA, 34 bp, Homo Sapiens; identical to SEQ ID NO: 19296

SEQ ID NO: 49360 - DNA, 29 bp, Homo Sapiens
ggtatagctcaggggtagagcatttgact

SEQ ID NO: 49361 - DNA, 16 bp, Homo Sapiens
ggtatcatgcaagatt

SEQ ID NO: 49362 - DNA, 16 bp, Homo Sapiens
ggtatgattctcgctt

SEQ ID NO: 49363 - DNA, 17 bp, Homo Sapiens
ggtatgattctcgcttc

SEQ ID NO: 49364 - DNA, 18 bp, Homo Sapiens
ggtatgattctcgcttcg

SEQ ID NO: 49365 - DNA, 16 bp, Homo Sapiens
ggtatgattctcggtt

SEQ ID NO: 49366 - DNA, 27 bp, Homo Sapiens
ggtatgattctcggtttgggtccgaga

SEQ ID NO: 49367 - DNA, 17 bp, Homo Sapiens
ggtcatcacgttcgcct

SEQ ID NO: 49368 - DNA, 29 bp, Homo Sapiens
ggtccagggttcaagtccctgttcgggcg

SEQ ID NO: 49369 - DNA, 30 bp, Homo Sapiens; identical to SEQ ID NO: 19349

SEQ ID NO: 49370 - DNA, 31 bp, Homo Sapiens; identical to SEQ ID NO: 19350

SEQ ID NO: 49371 - DNA, 32 bp, Homo Sapiens; identical to SEQ ID NO: 19351

SEQ ID NO: 49372 - DNA, 29 bp, Homo Sapiens
ggtcccatggtgtaatggttagcactctg

SEQ ID NO: 49373 - DNA, 31 bp, Homo Sapiens; identical to SEQ ID NO: 19362

SEQ ID NO: 49374 - DNA, 32 bp, Homo Sapiens; identical to SEQ ID NO: 19363

SEQ ID NO: 49375 - DNA, 33 bp, Homo Sapiens; identical to SEQ ID NO: 19364

SEQ ID NO: 49376 - DNA, 40 bp, Homo Sapiens; identical to SEQ ID NO: 19367

SEQ ID NO: 49377 - DNA, 41 bp, Homo Sapiens; identical to SEQ ID NO: 19368

SEQ ID NO: 49378 - DNA, 19 bp, Homo Sapiens
ggtcccgggttcaaatccc

SEQ ID NO: 49379 - DNA, 31 bp, Homo Sapiens; identical to SEQ ID NO: 38652

SEQ ID NO: 49380 - DNA, 30 bp, Homo Sapiens; identical to SEQ ID NO: 38653

SEQ ID NO: 49381 - DNA, 32 bp, Homo Sapiens
ggtccctggttcgatcccgggtttcggcacca

SEQ ID NO: 49382 - DNA, 16 bp, Homo Sapiens
ggtcctgggttcgagc

SEQ ID NO: 49383 - DNA, 17 bp, Homo Sapiens
ggtcctgggttcgagcc

SEQ ID NO: 49384 - DNA, 31 bp, Homo Sapiens; identical to SEQ ID NO: 19381

SEQ ID NO: 49385 - DNA, 18 bp, Homo Sapiens
ggtcgatggatcgaaacc

SEQ ID NO: 49386 - DNA, 16 bp, Homo Sapiens
ggtcgattccccgacg

SEQ ID NO: 49387 - DNA, 17 bp, Homo Sapiens
ggtcgattccccgacgg

SEQ ID NO: 49388 - DNA, 18 bp, Homo Sapiens
ggtcgattccccgacggg

SEQ ID NO: 49389 - DNA, 19 bp, Homo Sapiens
ggtcgattccccgacgggg

SEQ ID NO: 49390 - DNA, 20 bp, Homo Sapiens
ggtcgattccccgacgggga

SEQ ID NO: 49391 - DNA, 21 bp, Homo Sapiens
ggtcgattccccgacggggag

SEQ ID NO: 49392 - DNA, 22 bp, Homo Sapiens
ggtcgattccccgacggggagc

SEQ ID NO: 49393 - DNA, 23 bp, Homo Sapiens
ggtcgattccccgacggggagcc

SEQ ID NO: 49394 - DNA, 24 bp, Homo Sapiens
ggtcgattccccgacggggagcca

SEQ ID NO: 49395 - DNA, 30 bp, Homo Sapiens; identical to SEQ ID NO: 19395

SEQ ID NO: 49396 - DNA, 27 bp, Homo Sapiens
ggtcgcgggttcgatccccgtacgggc

SEQ ID NO: 49397 - DNA, 28 bp, Homo Sapiens
ggtcgcgggttcgatccccgtacgggcc

SEQ ID NO: 49398 - DNA, 30 bp, Homo Sapiens; identical to SEQ ID NO: 19406

SEQ ID NO: 49399 - DNA, 31 bp, Homo Sapiens; identical to SEQ ID NO: 19407

SEQ ID NO: 49400 - DNA, 32 bp, Homo Sapiens; identical to SEQ ID NO: 19408

SEQ ID NO: 49401 - DNA, 30 bp, Homo Sapiens; identical to SEQ ID NO: 19411

SEQ ID NO: 49402 - DNA, 31 bp, Homo Sapiens; identical to SEQ ID NO: 19412

SEQ ID NO: 49403 - DNA, 29 bp, Homo Sapiens
ggtcgtgggttcgagccccacgttgggcg

SEQ ID NO: 49404 - DNA, 30 bp, Homo Sapiens; identical to SEQ ID NO: 19423

SEQ ID NO: 49405 - DNA, 31 bp, Homo Sapiens; identical to SEQ ID NO: 19440

SEQ ID NO: 49406 - DNA, 16 bp, Homo Sapiens
ggtctaaggcgctgcg

SEQ ID NO: 49407 - DNA, 16 bp, Homo Sapiens
ggtctaaggcgctgga

SEQ ID NO: 49408 - DNA, 18 bp, Homo Sapiens
ggtctagcggttaggatt

SEQ ID NO: 49409 - DNA, 17 bp, Homo Sapiens
ggtgagcactctggact

SEQ ID NO: 49410 - DNA, 24 bp, Homo Sapiens
ggtgagcactctggactctgaatc

SEQ ID NO: 49411 - DNA, 16 bp, Homo Sapiens
ggtgagtatccccgcc

SEQ ID NO: 49412 - DNA, 20 bp, Homo Sapiens
ggtgagtatccccgcctgtc

SEQ ID NO: 49413 - DNA, 22 bp, Homo Sapiens
ggtgagtatccccgcctgtcac

SEQ ID NO: 49414 - DNA, 23 bp, Homo Sapiens
ggtgcagtggtagaattctcgcc

SEQ ID NO: 49415 - DNA, 16 bp, Homo Sapiens
ggtgcgagaggtcccg

SEQ ID NO: 49416 - DNA, 37 bp, Homo Sapiens; identical to SEQ ID NO: 19549

SEQ ID NO: 49417 - DNA, 27 bp, Homo Sapiens
ggtggagttaaagactttttctctgac

SEQ ID NO: 49418 - DNA, 28 bp, Homo Sapiens
ggtggagttaaagactttttctctgacc

SEQ ID NO: 49419 - DNA, 21 bp, Homo Sapiens
ggtggtctagtggttaggatt

SEQ ID NO: 49420 - DNA, 22 bp, Homo Sapiens
ggtggtctagtggttaggattc

SEQ ID NO: 49421 - DNA, 23 bp, Homo Sapiens
ggtggtctagtggttaggattcg

SEQ ID NO: 49422 - DNA, 27 bp, Homo Sapiens
ggtggtctagtggttaggattcggcgc

SEQ ID NO: 49423 - DNA, 28 bp, Homo Sapiens
ggtggtctagtggttaggattcggcgct

SEQ ID NO: 49424 - DNA, 37 bp, Homo Sapiens
ggtggtctagtggttaggattcggcgctctcaccgcc

SEQ ID NO: 49425 - DNA, 22 bp, Homo Sapiens
ggtggttcagtggtagaattct

SEQ ID NO: 49426 - DNA, 25 bp, Homo Sapiens
ggtggttcagtggtagaattctcgc

SEQ ID NO: 49427 - DNA, 26 bp, Homo Sapiens
ggtggttcagtggtagaattctcgcc

SEQ ID NO: 49428 - DNA, 27 bp, Homo Sapiens
ggtggttcagtggtagaattctcgcct

SEQ ID NO: 49429 - DNA, 28 bp, Homo Sapiens
ggtggttcagtggtagaattctcgcctg

SEQ ID NO: 49430 - DNA, 29 bp, Homo Sapiens
ggtggttcagtggtagaattctcgcctgc

SEQ ID NO: 49431 - DNA, 30 bp, Homo Sapiens; identical to SEQ ID NO: 19619

SEQ ID NO: 49432 - DNA, 32 bp, Homo Sapiens; identical to SEQ ID NO: 19621

SEQ ID NO: 49433 - DNA, 33 bp, Homo Sapiens; identical to SEQ ID NO: 19622

SEQ ID NO: 49434 - DNA, 43 bp, Homo Sapiens; identical to SEQ ID NO: 19625

SEQ ID NO: 49435 - DNA, 45 bp, Homo Sapiens; identical to SEQ ID NO: 19626

SEQ ID NO: 49436 - DNA, 23 bp, Homo Sapiens
ggtgtaatggttagcactctgga

SEQ ID NO: 49437 - DNA, 25 bp, Homo Sapiens
ggtgtaatggttagcactctggact

SEQ ID NO: 49438 - DNA, 26 bp, Homo Sapiens
ggtgtaatggttagcactctggactc

SEQ ID NO: 49439 - DNA, 31 bp, Homo Sapiens; identical to SEQ ID NO: 38741

SEQ ID NO: 49440 - DNA, 32 bp, Homo Sapiens; identical to SEQ ID NO: 19642

SEQ ID NO: 49441 - DNA, 33 bp, Homo Sapiens; identical to SEQ ID NO: 19643

SEQ ID NO: 49442 - DNA, 45 bp, Homo Sapiens; identical to SEQ ID NO: 19646

SEQ ID NO: 49443 - DNA, 17 bp, Homo Sapiens
ggtgtagtggtatcatg

SEQ ID NO: 49444 - DNA, 24 bp, Homo Sapiens
ggtgtagtggtatcatgcaagatt

SEQ ID NO: 49445 - DNA, 16 bp, Homo Sapiens
ggttaaggcattggac

SEQ ID NO: 49446 - DNA, 17 bp, Homo Sapiens
ggttagcactctggact

SEQ ID NO: 49447 - DNA, 18 bp, Homo Sapiens
ggttagcactctggactc

SEQ ID NO: 49448 - DNA, 19 bp, Homo Sapiens
ggttagcactctggactct

SEQ ID NO: 49449 - DNA, 20 bp, Homo Sapiens
ggttagcactctggactctg

SEQ ID NO: 49450 - DNA, 21 bp, Homo Sapiens
ggttagcactctggactctga

SEQ ID NO: 49451 - DNA, 22 bp, Homo Sapiens
ggttagcactctggactctgaa

SEQ ID NO: 49452 - DNA, 23 bp, Homo Sapiens
ggttagcactctggactctgaat

SEQ ID NO: 49453 - DNA, 24 bp, Homo Sapiens
ggttagcactctggactctgaatc

SEQ ID NO: 49454 - DNA, 25 bp, Homo Sapiens
ggttagcactctggactctgaatcc

SEQ ID NO: 49455 - DNA, 26 bp, Homo Sapiens
ggttagcactctggactctgaatcca

SEQ ID NO: 49456 - DNA, 28 bp, Homo Sapiens
ggttagcactctggactctgaatccagc

SEQ ID NO: 49457 - DNA, 29 bp, Homo Sapiens
ggttagcactctggactctgaatccagcg

SEQ ID NO: 49458 - DNA, 32 bp, Homo Sapiens; identical to SEQ ID NO: 19694

SEQ ID NO: 49459 - DNA, 33 bp, Homo Sapiens; identical to SEQ ID NO: 19695

SEQ ID NO: 49460 - DNA, 34 bp, Homo Sapiens; identical to SEQ ID NO: 19696

SEQ ID NO: 49461 - DNA, 36 bp, Homo Sapiens; identical to SEQ ID NO: 19698

SEQ ID NO: 49462 - DNA, 37 bp, Homo Sapiens; identical to SEQ ID NO: 19699

SEQ ID NO: 49463 - DNA, 38 bp, Homo Sapiens; identical to SEQ ID NO: 19700

SEQ ID NO: 49464 - DNA, 39 bp, Homo Sapiens; identical to SEQ ID NO: 19701

SEQ ID NO: 49465 - DNA, 22 bp, Homo Sapiens
ggttagcactctggactttgaa

SEQ ID NO: 49466 - DNA, 24 bp, Homo Sapiens
ggttagcactctggactttgaatc

SEQ ID NO: 49467 - DNA, 28 bp, Homo Sapiens
ggttagcactctggactttgaatccagc

SEQ ID NO: 49468 - DNA, 36 bp, Homo Sapiens; identical to SEQ ID NO: 19717

SEQ ID NO: 49469 - DNA, 17 bp, Homo Sapiens
ggttagcgcgcggtact

SEQ ID NO: 49470 - DNA, 17 bp, Homo Sapiens
ggttaggattcctggtt

SEQ ID NO: 49471 - DNA, 19 bp, Homo Sapiens
ggttaggattcctggtttt

SEQ ID NO: 49472 - DNA, 20 bp, Homo Sapiens
ggttaggattcctggttttc

SEQ ID NO: 49473 - DNA, 16 bp, Homo Sapiens
ggttaggattcggcgc

SEQ ID NO: 49474 - DNA, 17 bp, Homo Sapiens
ggttaggattcggcgct

SEQ ID NO: 49475 - DNA, 18 bp, Homo Sapiens
ggttaggattcggcgctc

SEQ ID NO: 49476 - DNA, 19 bp, Homo Sapiens
ggttaggattcggcgctct

SEQ ID NO: 49477 - DNA, 20 bp, Homo Sapiens
ggttaggattcggcgctctc

SEQ ID NO: 49478 - DNA, 23 bp, Homo Sapiens
ggttaggattcggcgctctcacc

SEQ ID NO: 49479 - DNA, 26 bp, Homo Sapiens
ggttaggattcggcgctctcaccgcc

SEQ ID NO: 49480 - DNA, 33 bp, Homo Sapiens; identical to SEQ ID NO: 19757

SEQ ID NO: 49481 - DNA, 38 bp, Homo Sapiens; identical to SEQ ID NO: 19762

SEQ ID NO: 49482 - DNA, 16 bp, Homo Sapiens
ggttagtactctgcgt

SEQ ID NO: 49483 - DNA, 17 bp, Homo Sapiens
ggttagtactctgcgtt

SEQ ID NO: 49484 - DNA, 18 bp, Homo Sapiens
ggttagtactctgcgttg

SEQ ID NO: 49485 - DNA, 19 bp, Homo Sapiens
ggttagtactctgcgttgt

SEQ ID NO: 49486 - DNA, 28 bp, Homo Sapiens
ggttagtactctgcgttgtggccgcagc

SEQ ID NO: 49487 - DNA, 32 bp, Homo Sapiens; identical to SEQ ID NO: 19777

SEQ ID NO: 49488 - DNA, 33 bp, Homo Sapiens; identical to SEQ ID NO: 19778

SEQ ID NO: 49489 - DNA, 16 bp, Homo Sapiens
ggttagtatccccgcc

SEQ ID NO: 49490 - DNA, 21 bp, Homo Sapiens
ggttatacccttcccgtacta

SEQ ID NO: 49491 - DNA, 24 bp, Homo Sapiens
ggttatacccttcccgtactacca

SEQ ID NO: 49492 - DNA, 16 bp, Homo Sapiens
ggttatcacgtctgct

SEQ ID NO: 49493 - DNA, 17 bp, Homo Sapiens
ggttatcacgtctgctt

SEQ ID NO: 49494 - DNA, 18 bp, Homo Sapiens
ggttatcacgtctgcttt

SEQ ID NO: 49495 - DNA, 17 bp, Homo Sapiens
ggttatcacgttcgcct

SEQ ID NO: 49496 - DNA, 18 bp, Homo Sapiens
ggttatcacgttcgcctc

SEQ ID NO: 49497 - DNA, 37 bp, Homo Sapiens
ggttatcacgttcgcctcacacgcgaaaggtccccgg

SEQ ID NO: 49498 - DNA, 16 bp, Homo Sapiens
ggttcaaatcccggac

SEQ ID NO: 49499 - DNA, 17 bp, Homo Sapiens
ggttcaaatcccggacg

SEQ ID NO: 49500 - DNA, 20 bp, Homo Sapiens
ggttcaaatcccggacgagc

SEQ ID NO: 49501 - DNA, 21 bp, Homo Sapiens
ggttcaaatcccggacgagcc

SEQ ID NO: 49502 - DNA, 17 bp, Homo Sapiens
ggttcaaatccgggtgc

SEQ ID NO: 49503 - DNA, 18 bp, Homo Sapiens
ggttcaaatccgggtgcc

SEQ ID NO: 49504 - DNA, 19 bp, Homo Sapiens
ggttcaaatccgggtgccc

SEQ ID NO: 49505 - DNA, 22 bp, Homo Sapiens
ggttcaaatccgggtgccccct

SEQ ID NO: 49506 - DNA, 22 bp, Homo Sapiens
ggttcaagtccctgttcgggcg

SEQ ID NO: 49507 - DNA, 23 bp, Homo Sapiens
ggttcaagtccctgttcgggcgc

SEQ ID NO: 49508 - DNA, 24 bp, Homo Sapiens
ggttcaagtccctgttcgggcgcc

SEQ ID NO: 49509 - DNA, 24 bp, Homo Sapiens
ggttcaatccccggcacctccacc

SEQ ID NO: 49510 - DNA, 25 bp, Homo Sapiens
ggttcaatccccggcacctccacca

SEQ ID NO: 49511 - DNA, 24 bp, Homo Sapiens
ggttcaatccccggcatctccacc

SEQ ID NO: 49512 - DNA, 23 bp, Homo Sapiens
ggttcaattccccgacggggagc

SEQ ID NO: 49513 - DNA, 24 bp, Homo Sapiens
ggttcaattccccgacggggagcc

SEQ ID NO: 49514 - DNA, 18 bp, Homo Sapiens
ggttcagtggtagaattc

SEQ ID NO: 49515 - DNA, 22 bp, Homo Sapiens
ggttcagtggtagaattctcgc

SEQ ID NO: 49516 - DNA, 23 bp, Homo Sapiens
ggttcagtggtagaattctcgcc

SEQ ID NO: 49517 - DNA, 24 bp, Homo Sapiens
ggttcagtggtagaattctcgcct

SEQ ID NO: 49518 - DNA, 27 bp, Homo Sapiens
ggttcagtggtagaattctcgcctgcc

SEQ ID NO: 49519 - DNA, 28 bp, Homo Sapiens
ggttcagtggtagaattctcgcctgcca

SEQ ID NO: 49520 - DNA, 29 bp, Homo Sapiens
ggttcagtggtagaattctcgcctgccac

SEQ ID NO: 49521 - DNA, 30 bp, Homo Sapiens; identical to SEQ ID NO: 19851

SEQ ID NO: 49522 - DNA, 40 bp, Homo Sapiens; identical to SEQ ID NO: 19853

SEQ ID NO: 49523 - DNA, 41 bp, Homo Sapiens; identical to SEQ ID NO: 38848

SEQ ID NO: 49524 - DNA, 42 bp, Homo Sapiens; identical to SEQ ID NO: 19854

SEQ ID NO: 49525 - DNA, 16 bp, Homo Sapiens
ggttccatagtgtagc

SEQ ID NO: 49526 - DNA, 19 bp, Homo Sapiens
ggttccatagtgtagcggt

SEQ ID NO: 49527 - DNA, 29 bp, Homo Sapiens
ggttccatagtgtagcggttatcacgtct

SEQ ID NO: 49528 - DNA, 30 bp, Homo Sapiens; identical to SEQ ID NO: 19863

SEQ ID NO: 49529 - DNA, 31 bp, Homo Sapiens; identical to SEQ ID NO: 19864

SEQ ID NO: 49530 - DNA, 32 bp, Homo Sapiens; identical to SEQ ID NO: 19865

SEQ ID NO: 49531 - DNA, 33 bp, Homo Sapiens; identical to SEQ ID NO: 19866

SEQ ID NO: 49532 - DNA, 34 bp, Homo Sapiens; identical to SEQ ID NO: 19867

SEQ ID NO: 49533 - DNA, 19 bp, Homo Sapiens
ggttccatagtgtagtggt

SEQ ID NO: 49534 - DNA, 23 bp, Homo Sapiens
ggttccatagtgtagtggttatc

SEQ ID NO: 49535 - DNA, 30 bp, Homo Sapiens
ggttccatagtgtagtggttatcacatctg

SEQ ID NO: 49536 - DNA, 31 bp, Homo Sapiens; identical to SEQ ID NO: 19882

SEQ ID NO: 49537 - DNA, 32 bp, Homo Sapiens; identical to SEQ ID NO: 19883

SEQ ID NO: 49538 - DNA, 33 bp, Homo Sapiens; identical to SEQ ID NO: 19884

SEQ ID NO: 49539 - DNA, 34 bp, Homo Sapiens; identical to SEQ ID NO: 19885

SEQ ID NO: 49540 - DNA, 29 bp, Homo Sapiens
ggttccatagtgtagtggttatcacgtct

SEQ ID NO: 49541 - DNA, 30 bp, Homo Sapiens; identical to SEQ ID NO: 19892

SEQ ID NO: 49542 - DNA, 31 bp, Homo Sapiens; identical to SEQ ID NO: 19893

SEQ ID NO: 49543 - DNA, 32 bp, Homo Sapiens; identical to SEQ ID NO: 19894

SEQ ID NO: 49544 - DNA, 33 bp, Homo Sapiens; identical to SEQ ID NO: 19895

SEQ ID NO: 49545 - DNA, 34 bp, Homo Sapiens; identical to SEQ ID NO: 19896

SEQ ID NO: 49546 - DNA, 35 bp, Homo Sapiens; identical to SEQ ID NO: 19897

SEQ ID NO: 49547 - DNA, 36 bp, Homo Sapiens; identical to SEQ ID NO: 19898

SEQ ID NO: 49548 - DNA, 33 bp, Homo Sapiens; identical to SEQ ID NO: 19910

SEQ ID NO: 49549 - DNA, 34 bp, Homo Sapiens; identical to SEQ ID NO: 19911

SEQ ID NO: 49550 - DNA, 32 bp, Homo Sapiens; identical to SEQ ID NO: 19919

SEQ ID NO: 49551 - DNA, 33 bp, Homo Sapiens; identical to SEQ ID NO: 19920

SEQ ID NO: 49552 - DNA, 34 bp, Homo Sapiens; identical to SEQ ID NO: 19921

SEQ ID NO: 49553 - DNA, 27 bp, Homo Sapiens
ggttccatggtgtaatggttagcactc

SEQ ID NO: 49554 - DNA, 29 bp, Homo Sapiens
ggttccatggtgtaatggttagcactctg

SEQ ID NO: 49555 - DNA, 30 bp, Homo Sapiens; identical to SEQ ID NO: 19931

SEQ ID NO: 49556 - DNA, 31 bp, Homo Sapiens; identical to SEQ ID NO: 19932

SEQ ID NO: 49557 - DNA, 32 bp, Homo Sapiens; identical to SEQ ID NO: 19933

SEQ ID NO: 49558 - DNA, 33 bp, Homo Sapiens; identical to SEQ ID NO: 19934

SEQ ID NO: 49559 - DNA, 34 bp, Homo Sapiens; identical to SEQ ID NO: 19935

SEQ ID NO: 49560 - DNA, 35 bp, Homo Sapiens; identical to SEQ ID NO: 19936

SEQ ID NO: 49561 - DNA, 36 bp, Homo Sapiens; identical to SEQ ID NO: 19937

SEQ ID NO: 49562 - DNA, 40 bp, Homo Sapiens; identical to SEQ ID NO: 19941

SEQ ID NO: 49563 - DNA, 41 bp, Homo Sapiens; identical to SEQ ID NO: 19942

SEQ ID NO: 49564 - DNA, 42 bp, Homo Sapiens; identical to SEQ ID NO: 19943

SEQ ID NO: 49565 - DNA, 44 bp, Homo Sapiens; identical to SEQ ID NO: 19944

SEQ ID NO: 49566 - DNA, 45 bp, Homo Sapiens; identical to SEQ ID NO: 19945

SEQ ID NO: 49567 - DNA, 46 bp, Homo Sapiens; identical to SEQ ID NO: 19946

SEQ ID NO: 49568 - DNA, 47 bp, Homo Sapiens; identical to SEQ ID NO: 19947

SEQ ID NO: 49569 - DNA, 17 bp, Homo Sapiens
ggttccgggttcgagtc

SEQ ID NO: 49570 - DNA, 16 bp, Homo Sapiens
ggttcgaaaccgggcg

SEQ ID NO: 49571 - DNA, 18 bp, Homo Sapiens
ggttcgaaaccgggcgga

SEQ ID NO: 49572 - DNA, 22 bp, Homo Sapiens
ggttcgaaaccgggcggaaaca

SEQ ID NO: 49573 - DNA, 24 bp, Homo Sapiens
ggttcgaaaccgggcggaaacacc

SEQ ID NO: 49574 - DNA, 22 bp, Homo Sapiens
ggttcgaaccccgtccgtgcct

SEQ ID NO: 49575 - DNA, 23 bp, Homo Sapiens
ggttcgaaccccgtccgtgcctc

SEQ ID NO: 49576 - DNA, 24 bp, Homo Sapiens
ggttcgaaccctgctcgctgcgcc

SEQ ID NO: 49577 - DNA, 24 bp, Homo Sapiens
ggttcgaatcccaccgctgccacc

SEQ ID NO: 49578 - DNA, 24 bp, Homo Sapiens
ggttcgaatcccactcctgacacc

SEQ ID NO: 49579 - DNA, 24 bp, Homo Sapiens
ggttcgaatcccagcggtgcctcc

SEQ ID NO: 49580 - DNA, 23 bp, Homo Sapiens
ggttcgaatcccatcctcgtcgc

SEQ ID NO: 49581 - DNA, 24 bp, Homo Sapiens
ggttcgaatcccatcctcgtcgcc

SEQ ID NO: 49582 - DNA, 25 bp, Homo Sapiens
ggttcgaatcccatcctcgtcgcca

SEQ ID NO: 49583 - DNA, 21 bp, Homo Sapiens
ggttcgaatccgagtcacggc

SEQ ID NO: 49584 - DNA, 22 bp, Homo Sapiens
ggttcgaatccgagtcacggca

SEQ ID NO: 49585 - DNA, 23 bp, Homo Sapiens
ggttcgaatccgagtcacggcac

SEQ ID NO: 49586 - DNA, 25 bp, Homo Sapiens
ggttcgaatccgagtcacggcacca

SEQ ID NO: 49587 - DNA, 23 bp, Homo Sapiens
ggttcgaatccggctcgaaggac

SEQ ID NO: 49588 - DNA, 23 bp, Homo Sapiens
ggttcgaatccggctcggaggac

SEQ ID NO: 49589 - DNA, 24 bp, Homo Sapiens
ggttcgaatcctgccgactacgcc

SEQ ID NO: 49590 - DNA, 24 bp, Homo Sapiens
ggttcgaatcctgttcgtgacgcc

SEQ ID NO: 49591 - DNA, 16 bp, Homo Sapiens
ggttcgacccccggct

SEQ ID NO: 49592 - DNA, 17 bp, Homo Sapiens
ggttcgacccccggctc

SEQ ID NO: 49593 - DNA, 22 bp, Homo Sapiens
ggttcgactcccggtatgggaa

SEQ ID NO: 49594 - DNA, 23 bp, Homo Sapiens
ggttcgactcccggtatgggaac

SEQ ID NO: 49595 - DNA, 24 bp, Homo Sapiens
ggttcgactcccggtatgggaacc

SEQ ID NO: 49596 - DNA, 16 bp, Homo Sapiens
ggttcgactcccggtg

SEQ ID NO: 49597 - DNA, 17 bp, Homo Sapiens
ggttcgactcccggtgt

SEQ ID NO: 49598 - DNA, 18 bp, Homo Sapiens
ggttcgactcccggtgtg

SEQ ID NO: 49599 - DNA, 20 bp, Homo Sapiens
ggttcgactcccggtgtggg

SEQ ID NO: 49600 - DNA, 21 bp, Homo Sapiens
ggttcgactcccggtgtggga

SEQ ID NO: 49601 - DNA, 22 bp, Homo Sapiens
ggttcgactcccggtgtgggaa

SEQ ID NO: 49602 - DNA, 23 bp, Homo Sapiens
ggttcgactcccggtgtgggaac

SEQ ID NO: 49603 - DNA, 24 bp, Homo Sapiens
ggttcgactcccggtgtgggaacc

SEQ ID NO: 49604 - DNA, 24 bp, Homo Sapiens
ggttcgactcctggctggctcgcc

SEQ ID NO: 49605 - DNA, 24 bp, Homo Sapiens
ggttcgagccccacgttgggcgcc

SEQ ID NO: 49606 - DNA, 24 bp, Homo Sapiens
ggttcgagtcccatctggggtgcc

SEQ ID NO: 49607 - DNA, 16 bp, Homo Sapiens
ggttcgatccccggca

SEQ ID NO: 49608 - DNA, 20 bp, Homo Sapiens
ggttcgatccccggcatctc

SEQ ID NO: 49609 - DNA, 24 bp, Homo Sapiens
ggttcgatccccggcatctccacc

SEQ ID NO: 49610 - DNA, 25 bp, Homo Sapiens
ggttcgatccccggcatctccacca

SEQ ID NO: 49611 - DNA, 20 bp, Homo Sapiens
ggttcgatccccgtacgggc

SEQ ID NO: 49612 - DNA, 18 bp, Homo Sapiens
ggttcgatcccgggcgga

SEQ ID NO: 49613 - DNA, 24 bp, Homo Sapiens
ggttcgatcccgggcggaaacacc

SEQ ID NO: 49614 - DNA, 23 bp, Homo Sapiens
ggttcgatcccgggtttcggcac

SEQ ID NO: 49615 - DNA, 16 bp, Homo Sapiens
ggttcgattccccgac

SEQ ID NO: 49616 - DNA, 17 bp, Homo Sapiens
ggttcgattccccgacg

SEQ ID NO: 49617 - DNA, 18 bp, Homo Sapiens
ggttcgattccccgacgg

SEQ ID NO: 49618 - DNA, 19 bp, Homo Sapiens
ggttcgattccccgacggg

SEQ ID NO: 49619 - DNA, 21 bp, Homo Sapiens
ggttcgattccccgacgggga

SEQ ID NO: 49620 - DNA, 22 bp, Homo Sapiens
ggttcgattccccgacggggag

SEQ ID NO: 49621 - DNA, 23 bp, Homo Sapiens
ggttcgattccccgacggggagc

SEQ ID NO: 49622 - DNA, 24 bp, Homo Sapiens
ggttcgattccccgacggggagcc

SEQ ID NO: 49623 - DNA, 25 bp, Homo Sapiens
ggttcgattccccgacggggagcca

SEQ ID NO: 49624 - DNA, 16 bp, Homo Sapiens
ggttcgattcccggcc

SEQ ID NO: 49625 - DNA, 25 bp, Homo Sapiens
ggttcgattcccggccaacgcacca

SEQ ID NO: 49626 - DNA, 24 bp, Homo Sapiens
ggttcgattcccggccaatgcacc

SEQ ID NO: 49627 - DNA, 16 bp, Homo Sapiens
ggttcgattcccgggc

SEQ ID NO: 49628 - DNA, 17 bp, Homo Sapiens
ggttcgattcccgggcg

SEQ ID NO: 49629 - DNA, 18 bp, Homo Sapiens
ggttcgattcccgggcgg

SEQ ID NO: 49630 - DNA, 19 bp, Homo Sapiens
ggttcgattcccgggcggc

SEQ ID NO: 49631 - DNA, 21 bp, Homo Sapiens
ggttcgattcccgggcggcgc

SEQ ID NO: 49632 - DNA, 24 bp, Homo Sapiens
ggttcgattcccgggcggcgcacc

SEQ ID NO: 49633 - DNA, 16 bp, Homo Sapiens
ggttcgattcccggtc

SEQ ID NO: 49634 - DNA, 18 bp, Homo Sapiens
ggttcgattcccggtcag

SEQ ID NO: 49635 - DNA, 19 bp, Homo Sapiens
ggttcgattcccggtcagg

SEQ ID NO: 49636 - DNA, 20 bp, Homo Sapiens
ggttcgattcccggtcaggg

SEQ ID NO: 49637 - DNA, 21 bp, Homo Sapiens
ggttcgattcccggtcaggga

SEQ ID NO: 49638 - DNA, 22 bp, Homo Sapiens
ggttcgattcccggtcagggaa

SEQ ID NO: 49639 - DNA, 23 bp, Homo Sapiens
ggttcgattcccggtcagggaac

SEQ ID NO: 49640 - DNA, 24 bp, Homo Sapiens
ggttcgattcccggtcagggaacc

SEQ ID NO: 49641 - DNA, 25 bp, Homo Sapiens
ggttcgattcccggtcagggaacca

SEQ ID NO: 49642 - DNA, 23 bp, Homo Sapiens
ggttcgattccggctcgaaggac

SEQ ID NO: 49643 - DNA, 24 bp, Homo Sapiens
ggttcgattccggctcgaaggacc

SEQ ID NO: 49644 - DNA, 20 bp, Homo Sapiens
ggttcgattctcatagtcct

SEQ ID NO: 49645 - DNA, 22 bp, Homo Sapiens
ggttcgattctcatagtcctag

SEQ ID NO: 49646 - DNA, 23 bp, Homo Sapiens
ggttcgattctcatagtcctagc

SEQ ID NO: 49647 - DNA, 31 bp, Homo Sapiens; identical to SEQ ID NO: 20118

SEQ ID NO: 49648 - DNA, 20 bp, Homo Sapiens
ggttgtagtccgtgcgagaa

SEQ ID NO: 49649 - DNA, 22 bp, Homo Sapiens
ggttgtagtccgtgcgagaata

SEQ ID NO: 49650 - DNA, 24 bp, Homo Sapiens
ggttgtagtccgtgcgagaatacc

SEQ ID NO: 49651 - DNA, 25 bp, Homo Sapiens
ggttgtagtccgtgcgagaatacca

SEQ ID NO: 49652 - DNA, 38 bp, Homo Sapiens; identical to SEQ ID NO: 39029

SEQ ID NO: 49653 - DNA, 34 bp, Homo Sapiens; identical to SEQ ID NO: 20149

SEQ ID NO: 49654 - DNA, 34 bp, Homo Sapiens; identical to SEQ ID NO: 20154

SEQ ID NO: 49655 - DNA, 44 bp, Homo Sapiens; identical to SEQ ID NO: 20164

SEQ ID NO: 49656 - DNA, 20 bp, Homo Sapiens
ggtttttcatatcattggtc

SEQ ID NO: 49657 - DNA, 21 bp, Homo Sapiens
ggtttttcatatcattggtcg

SEQ ID NO: 49658 - DNA, 26 bp, Homo Sapiens
ggtttttcatatcattggtcgtggtt

SEQ ID NO: 49659 - DNA, 27 bp, Homo Sapiens
ggtttttcatatcattggtcgtggttg

SEQ ID NO: 49660 - DNA, 28 bp, Homo Sapiens
ggtttttcatatcattggtcgtggttgt

SEQ ID NO: 49661 - DNA, 29 bp, Homo Sapiens
ggtttttcatatcattggtcgtggttgta

SEQ ID NO: 49662 - DNA, 33 bp, Homo Sapiens; identical to SEQ ID NO: 20186

SEQ ID NO: 49663 - DNA, 34 bp, Homo Sapiens; identical to SEQ ID NO: 20187

SEQ ID NO: 49664 - DNA, 36 bp, Homo Sapiens; identical to SEQ ID NO: 20189

SEQ ID NO: 49665 - DNA, 37 bp, Homo Sapiens; identical to SEQ ID NO: 20190

SEQ ID NO: 49666 - DNA, 38 bp, Homo Sapiens; identical to SEQ ID NO: 20191

SEQ ID NO: 49667 - DNA, 39 bp, Homo Sapiens; identical to SEQ ID NO: 20192

SEQ ID NO: 49668 - DNA, 40 bp, Homo Sapiens; identical to SEQ ID NO: 20193

SEQ ID NO: 49669 - DNA, 41 bp, Homo Sapiens; identical to SEQ ID NO: 20194

SEQ ID NO: 49670 - DNA, 42 bp, Homo Sapiens; identical to SEQ ID NO: 20195

SEQ ID NO: 49671 - DNA, 43 bp, Homo Sapiens; identical to SEQ ID NO: 20196

SEQ ID NO: 49672 - DNA, 44 bp, Homo Sapiens; identical to SEQ ID NO: 20197

SEQ ID NO: 49673 - DNA, 45 bp, Homo Sapiens; identical to SEQ ID NO: 20198

SEQ ID NO: 49674 - DNA, 46 bp, Homo Sapiens; identical to SEQ ID NO: 20199

SEQ ID NO: 49675 - DNA, 47 bp, Homo Sapiens; identical to SEQ ID NO: 20200

SEQ ID NO: 49676 - DNA, 39 bp, Homo Sapiens; identical to SEQ ID NO: 20214

SEQ ID NO: 49677 - DNA, 30 bp, Homo Sapiens
gtaaaccgaagatcacgggttcgaaccccg

SEQ ID NO: 49678 - DNA, 42 bp, Homo Sapiens
gtaaaccgaagatcacgggttcgaaccccgtccgtgcctcca

SEQ ID NO: 49679 - DNA, 20 bp, Homo Sapiens
gtaaaccgaagatcgcgggt

SEQ ID NO: 49680 - DNA, 41 bp, Homo Sapiens; identical to SEQ ID NO: 20230

SEQ ID NO: 49681 - DNA, 20 bp, Homo Sapiens
gtaaaccggagatgaaaacc

SEQ ID NO: 49682 - DNA, 35 bp, Homo Sapiens; identical to SEQ ID NO: 20242

SEQ ID NO: 49683 - DNA, 36 bp, Homo Sapiens; identical to SEQ ID NO: 20243

SEQ ID NO: 49684 - DNA, 37 bp, Homo Sapiens; identical to SEQ ID NO: 20244

SEQ ID NO: 49685 - DNA, 29 bp, Homo Sapiens
gtaaggtcagctaaataagctatcgggcc

SEQ ID NO: 49686 - DNA, 30 bp, Homo Sapiens; identical to SEQ ID NO: 20279

SEQ ID NO: 49687 - DNA, 29 bp, Homo Sapiens
gtaatggtgagcactctggactctgaatc

SEQ ID NO: 49688 - DNA, 16 bp, Homo Sapiens
gtaatggttagcactc

SEQ ID NO: 49689 - DNA, 18 bp, Homo Sapiens
gtaatggttagcactctg

SEQ ID NO: 49690 - DNA, 19 bp, Homo Sapiens
gtaatggttagcactctgg

SEQ ID NO: 49691 - DNA, 20 bp, Homo Sapiens
gtaatggttagcactctgga

SEQ ID NO: 49692 - DNA, 21 bp, Homo Sapiens
gtaatggttagcactctggac

SEQ ID NO: 49693 - DNA, 22 bp, Homo Sapiens
gtaatggttagcactctggact

SEQ ID NO: 49694 - DNA, 23 bp, Homo Sapiens
gtaatggttagcactctggactc

SEQ ID NO: 49695 - DNA, 24 bp, Homo Sapiens
gtaatggttagcactctggactct

SEQ ID NO: 49696 - DNA, 25 bp, Homo Sapiens
gtaatggttagcactctggactctg

SEQ ID NO: 49697 - DNA, 27 bp, Homo Sapiens
gtaatggttagcactctggactctgaa

SEQ ID NO: 49698 - DNA, 29 bp, Homo Sapiens
gtaatggttagcactctggactctgaatc

SEQ ID NO: 49699 - DNA, 30 bp, Homo Sapiens; identical to SEQ ID NO: 20328

SEQ ID NO: 49700 - DNA, 34 bp, Homo Sapiens; identical to SEQ ID NO: 20329

SEQ ID NO: 49701 - DNA, 16 bp, Homo Sapiens
gtagaattctcgcctg

SEQ ID NO: 49702 - DNA, 17 bp, Homo Sapiens
gtagaattctcgcctgc

SEQ ID NO: 49703 - DNA, 18 bp, Homo Sapiens
gtagaattctcgcctgcc

SEQ ID NO: 49704 - DNA, 19 bp, Homo Sapiens
gtagaattctcgcctgcca

SEQ ID NO: 49705 - DNA, 20 bp, Homo Sapiens
gtagaattctcgcctgccac

SEQ ID NO: 49706 - DNA, 21 bp, Homo Sapiens
gtagaattctcgcctgccacg

SEQ ID NO: 49707 - DNA, 22 bp, Homo Sapiens
gtagaattctcgcctgccacgc

SEQ ID NO: 49708 - DNA, 24 bp, Homo Sapiens
gtagaattctcgcctgccacgcgg

SEQ ID NO: 49709 - DNA, 25 bp, Homo Sapiens
gtagaattctcgcctgccacgcggg

SEQ ID NO: 49710 - DNA, 26 bp, Homo Sapiens
gtagaattctcgcctgccacgcggga

SEQ ID NO: 49711 - DNA, 27 bp, Homo Sapiens
gtagaattctcgcctgccacgcgggag

SEQ ID NO: 49712 - DNA, 30 bp, Homo Sapiens; identical to SEQ ID NO: 20363

SEQ ID NO: 49713 - DNA, 31 bp, Homo Sapiens; identical to SEQ ID NO: 20364

SEQ ID NO: 49714 - DNA, 32 bp, Homo Sapiens; identical to SEQ ID NO: 20365

SEQ ID NO: 49715 - DNA, 33 bp, Homo Sapiens; identical to SEQ ID NO: 20366

SEQ ID NO: 49716 - DNA, 34 bp, Homo Sapiens; identical to SEQ ID NO: 20367

SEQ ID NO: 49717 - DNA, 35 bp, Homo Sapiens; identical to SEQ ID NO: 20368

SEQ ID NO: 49718 - DNA, 36 bp, Homo Sapiens; identical to SEQ ID NO: 20369

SEQ ID NO: 49719 - DNA, 16 bp, Homo Sapiens
gtagagcatgagactc

SEQ ID NO: 49720 - DNA, 33 bp, Homo Sapiens; identical to SEQ ID NO: 20392

SEQ ID NO: 49721 - DNA, 34 bp, Homo Sapiens; identical to SEQ ID NO: 20393

SEQ ID NO: 49722 - DNA, 36 bp, Homo Sapiens; identical to SEQ ID NO: 20395

SEQ ID NO: 49723 - DNA, 37 bp, Homo Sapiens; identical to SEQ ID NO: 20396

SEQ ID NO: 49724 - DNA, 16 bp, Homo Sapiens
gtagagcatgggactc

SEQ ID NO: 49725 - DNA, 23 bp, Homo Sapiens
gtagagcatgggactcttaatcc

SEQ ID NO: 49726 - DNA, 24 bp, Homo Sapiens
gtagagcatgggactcttaatccc

SEQ ID NO: 49727 - DNA, 34 bp, Homo Sapiens; identical to SEQ ID NO: 20409

SEQ ID NO: 49728 - DNA, 35 bp, Homo Sapiens; identical to SEQ ID NO: 20410

SEQ ID NO: 49729 - DNA, 36 bp, Homo Sapiens
gtagagcatgggactcttaatcccagggtcgtgggt

SEQ ID NO: 49730 - DNA, 37 bp, Homo Sapiens; identical to SEQ ID NO: 20411

SEQ ID NO: 49731 - DNA, 31 bp, Homo Sapiens; identical to SEQ ID NO: 20441

SEQ ID NO: 49732 - DNA, 32 bp, Homo Sapiens
gtaggatggggtgtgataggtggcacggagaa

SEQ ID NO: 49733 - DNA, 33 bp, Homo Sapiens
gtaggatggggtgtgataggtggcacggagaat

SEQ ID NO: 49734 - DNA, 34 bp, Homo Sapiens
gtaggatggggtgtgataggtggcacggagaatt

SEQ ID NO: 49735 - DNA, 36 bp, Homo Sapiens
gtaggatggggtgtgataggtggcacggagaatttt

SEQ ID NO: 49736 - DNA, 37 bp, Homo Sapiens
gtaggatggggtgtgataggtggcacggagaattttg

SEQ ID NO: 49737 - DNA, 18 bp, Homo Sapiens
gtagtccgtgcgagaata

SEQ ID NO: 49738 - DNA, 19 bp, Homo Sapiens
gtagtccgtgcgagaatac

SEQ ID NO: 49739 - DNA, 20 bp, Homo Sapiens
gtagtccgtgcgagaatacc

SEQ ID NO: 49740 - DNA, 21 bp, Homo Sapiens
gtagtccgtgcgagaatacca

SEQ ID NO: 49741 - DNA, 16 bp, Homo Sapiens
gtagtcgtggccgagt

SEQ ID NO: 49742 - DNA, 17 bp, Homo Sapiens
gtagtcgtggccgagtg

SEQ ID NO: 49743 - DNA, 18 bp, Homo Sapiens
gtagtcgtggccgagtgg

SEQ ID NO: 49744 - DNA, 19 bp, Homo Sapiens
gtagtcgtggccgagtggt

SEQ ID NO: 49745 - DNA, 20 bp, Homo Sapiens
gtagtcgtggccgagtggtt

SEQ ID NO: 49746 - DNA, 21 bp, Homo Sapiens
gtagtcgtggccgagtggtta

SEQ ID NO: 49747 - DNA, 22 bp, Homo Sapiens
gtagtcgtggccgagtggttaa

SEQ ID NO: 49748 - DNA, 23 bp, Homo Sapiens
gtagtcgtggccgagtggttaag

SEQ ID NO: 49749 - DNA, 24 bp, Homo Sapiens
gtagtcgtggccgagtggttaagg

SEQ ID NO: 49750 - DNA, 25 bp, Homo Sapiens
gtagtcgtggccgagtggttaaggc

SEQ ID NO: 49751 - DNA, 29 bp, Homo Sapiens
gtagtcgtggccgagtggttaaggcgatg

SEQ ID NO: 49752 - DNA, 32 bp, Homo Sapiens; identical to SEQ ID NO: 20460

SEQ ID NO: 49753 - DNA, 33 bp, Homo Sapiens; identical to SEQ ID NO: 20461

SEQ ID NO: 49754 - DNA, 32 bp, Homo Sapiens
gtagtcgtggccgagtggttaaggtgatggac

SEQ ID NO: 49755 - DNA, 22 bp, Homo Sapiens
gtagtggttatcacgttcgcct

SEQ ID NO: 49756 - DNA, 17 bp, Homo Sapiens
gtagtgtagtggtcatc

SEQ ID NO: 49757 - DNA, 17 bp, Homo Sapiens
gtagtgtagtggttatc

SEQ ID NO: 49758 - DNA, 27 bp, Homo Sapiens
gtagtgtagtggttatcacgttcgcct

SEQ ID NO: 49759 - DNA, 22 bp, Homo Sapiens
gtatagtggtgagcatagctgc

SEQ ID NO: 49760 - DNA, 21 bp, Homo Sapiens
gtatagtggttagtactctgc

SEQ ID NO: 49761 - DNA, 22 bp, Homo Sapiens
gtatagtggttagtactctgcg

SEQ ID NO: 49762 - DNA, 23 bp, Homo Sapiens
gtatagtggttagtactctgcgt

SEQ ID NO: 49763 - DNA, 24 bp, Homo Sapiens
gtatagtggttagtactctgcgtt

SEQ ID NO: 49764 - DNA, 30 bp, Homo Sapiens; identical to SEQ ID NO: 20556

SEQ ID NO: 49765 - DNA, 31 bp, Homo Sapiens; identical to SEQ ID NO: 20557

SEQ ID NO: 49766 - DNA, 39 bp, Homo Sapiens; identical to SEQ ID NO: 39162

SEQ ID NO: 49767 - DNA, 35 bp, Homo Sapiens; identical to SEQ ID NO: 39164

SEQ ID NO: 49768 - DNA, 36 bp, Homo Sapiens; identical to SEQ ID NO: 39165

SEQ ID NO: 49769 - DNA, 37 bp, Homo Sapiens; identical to SEQ ID NO: 20577

SEQ ID NO: 49770 - DNA, 38 bp, Homo Sapiens; identical to SEQ ID NO: 20578

SEQ ID NO: 49771 - DNA, 28 bp, Homo Sapiens
gtatgaggccccgggttcgatccccggc

SEQ ID NO: 49772 - DNA, 34 bp, Homo Sapiens; identical to SEQ ID NO: 20586

SEQ ID NO: 49773 - DNA, 35 bp, Homo Sapiens; identical to SEQ ID NO: 20587

SEQ ID NO: 49774 - DNA, 36 bp, Homo Sapiens; identical to SEQ ID NO: 20588

SEQ ID NO: 49775 - DNA, 37 bp, Homo Sapiens; identical to SEQ ID NO: 20589

SEQ ID NO: 49776 - DNA, 38 bp, Homo Sapiens; identical to SEQ ID NO: 20590

SEQ ID NO: 49777 - DNA, 35 bp, Homo Sapiens; identical to SEQ ID NO: 20596

SEQ ID NO: 49778 - DNA, 36 bp, Homo Sapiens; identical to SEQ ID NO: 20597

SEQ ID NO: 49779 - DNA, 37 bp, Homo Sapiens; identical to SEQ ID NO: 20598

SEQ ID NO: 49780 - DNA, 38 bp, Homo Sapiens; identical to SEQ ID NO: 39174

SEQ ID NO: 49781 - DNA, 17 bp, Homo Sapiens
gtatgattctcgctttg

SEQ ID NO: 49782 - DNA, 22 bp, Homo Sapiens
gtatgattctcggtttgggtcc

SEQ ID NO: 49783 - DNA, 23 bp, Homo Sapiens
gtatgattctcggtttgggtccg

SEQ ID NO: 49784 - DNA, 28 bp, Homo Sapiens
gtcaaagttaaattataggctaaatcct

SEQ ID NO: 49785 - DNA, 16 bp, Homo Sapiens
gtcacgcgggagaccg

SEQ ID NO: 49786 - DNA, 42 bp, Homo Sapiens; identical to SEQ ID NO: 20627

SEQ ID NO: 49787 - DNA, 40 bp, Homo Sapiens; identical to SEQ ID NO: 20633

SEQ ID NO: 49788 - DNA, 41 bp, Homo Sapiens; identical to SEQ ID NO: 20634

SEQ ID NO: 49789 - DNA, 42 bp, Homo Sapiens; identical to SEQ ID NO: 20635

SEQ ID NO: 49790 - DNA, 16 bp, Homo Sapiens
gtcacggtggccgagt

SEQ ID NO: 49791 - DNA, 18 bp, Homo Sapiens
gtcacggtggccgagtgg

SEQ ID NO: 49792 - DNA, 24 bp, Homo Sapiens
gtcacggtggccgagtggttaagg

SEQ ID NO: 49793 - DNA, 16 bp, Homo Sapiens
gtcacgtcggggtcac

SEQ ID NO: 49794 - DNA, 17 bp, Homo Sapiens
gtcacgtcggggtcacc

SEQ ID NO: 49795 - DNA, 18 bp, Homo Sapiens
gtcacgtcggggtcacca

SEQ ID NO: 49796 - DNA, 24 bp, Homo Sapiens
gtcagctaaataagctatcgggcc

SEQ ID NO: 49797 - DNA, 25 bp, Homo Sapiens
gtcagctaaataagctatcgggccc

SEQ ID NO: 49798 - DNA, 16 bp, Homo Sapiens
gtcaggatggccgagc

SEQ ID NO: 49799 - DNA, 17 bp, Homo Sapiens
gtcaggatggccgagcg

SEQ ID NO: 49800 - DNA, 18 bp, Homo Sapiens
gtcaggatggccgagcgg

SEQ ID NO: 49801 - DNA, 19 bp, Homo Sapiens
gtcaggatggccgagcggt

SEQ ID NO: 49802 - DNA, 20 bp, Homo Sapiens
gtcaggatggccgagcggtc

SEQ ID NO: 49803 - DNA, 21 bp, Homo Sapiens
gtcaggatggccgagcggtct

SEQ ID NO: 49804 - DNA, 22 bp, Homo Sapiens
gtcaggatggccgagcggtcta

SEQ ID NO: 49805 - DNA, 23 bp, Homo Sapiens
gtcaggatggccgagcggtctaa

SEQ ID NO: 49806 - DNA, 24 bp, Homo Sapiens
gtcaggatggccgagcggtctaag

SEQ ID NO: 49807 - DNA, 25 bp, Homo Sapiens
gtcaggatggccgagcggtctaagg

SEQ ID NO: 49808 - DNA, 26 bp, Homo Sapiens
gtcaggatggccgagcggtctaaggc

SEQ ID NO: 49809 - DNA, 29 bp, Homo Sapiens
gtcaggatggccgagcggtctaaggcgct

SEQ ID NO: 49810 - DNA, 30 bp, Homo Sapiens; identical to SEQ ID NO: 20674

SEQ ID NO: 49811 - DNA, 31 bp, Homo Sapiens; identical to SEQ ID NO: 20675

SEQ ID NO: 49812 - DNA, 32 bp, Homo Sapiens; identical to SEQ ID NO: 20676

SEQ ID NO: 49813 - DNA, 33 bp, Homo Sapiens; identical to SEQ ID NO: 20677

SEQ ID NO: 49814 - DNA, 34 bp, Homo Sapiens; identical to SEQ ID NO: 20678

SEQ ID NO: 49815 - DNA, 35 bp, Homo Sapiens; identical to SEQ ID NO: 20679

SEQ ID NO: 49816 - DNA, 36 bp, Homo Sapiens; identical to SEQ ID NO: 20680

SEQ ID NO: 49817 - DNA, 16 bp, Homo Sapiens
gtcaggatggccgagt

SEQ ID NO: 49818 - DNA, 17 bp, Homo Sapiens
gtcaggatggccgagtg

SEQ ID NO: 49819 - DNA, 18 bp, Homo Sapiens
gtcaggatggccgagtgg

SEQ ID NO: 49820 - DNA, 19 bp, Homo Sapiens
gtcaggatggccgagtggt

SEQ ID NO: 49821 - DNA, 20 bp, Homo Sapiens
gtcaggatggccgagtggtc

SEQ ID NO: 49822 - DNA, 21 bp, Homo Sapiens
gtcaggatggccgagtggtct

SEQ ID NO: 49823 - DNA, 22 bp, Homo Sapiens
gtcaggatggccgagtggtcta

SEQ ID NO: 49824 - DNA, 24 bp, Homo Sapiens
gtcaggatggccgagtggtctaag

SEQ ID NO: 49825 - DNA, 25 bp, Homo Sapiens
gtcaggatggccgagtggtctaagg

SEQ ID NO: 49826 - DNA, 26 bp, Homo Sapiens
gtcaggatggccgagtggtctaaggc

SEQ ID NO: 49827 - DNA, 32 bp, Homo Sapiens; identical to SEQ ID NO: 20695

SEQ ID NO: 49828 - DNA, 33 bp, Homo Sapiens; identical to SEQ ID NO: 20696

SEQ ID NO: 49829 - DNA, 34 bp, Homo Sapiens; identical to SEQ ID NO: 20697

SEQ ID NO: 49830 - DNA, 18 bp, Homo Sapiens
gtcagtagagcatcagac

SEQ ID NO: 49831 - DNA, 18 bp, Homo Sapiens
gtcatggaggccatgggg

SEQ ID NO: 49832 - DNA, 28 bp, Homo Sapiens
gtccagggttcaagtccctgttcgggcg

SEQ ID NO: 49833 - DNA, 29 bp, Homo Sapiens
gtccagggttcaagtccctgttcgggcgc

SEQ ID NO: 49834 - DNA, 30 bp, Homo Sapiens; identical to SEQ ID NO: 20712

SEQ ID NO: 49835 - DNA, 31 bp, Homo Sapiens; identical to SEQ ID NO: 20713

SEQ ID NO: 49836 - DNA, 17 bp, Homo Sapiens
gtcccaccagagtcgcc

SEQ ID NO: 49837 - DNA, 17 bp, Homo Sapiens
gtcccacctggggtacc

SEQ ID NO: 49838 - DNA, 18 bp, Homo Sapiens
gtcccacctggggtacca

SEQ ID NO: 49839 - DNA, 17 bp, Homo Sapiens
gtcccacctggggtgcc

SEQ ID NO: 49840 - DNA, 18 bp, Homo Sapiens
gtcccacctggggtgcca

SEQ ID NO: 49841 - DNA, 17 bp, Homo Sapiens
gtcccatctggggtgcc

SEQ ID NO: 49842 - DNA, 28 bp, Homo Sapiens
gtcccatggtgtaatggttagcactctg

SEQ ID NO: 49843 - DNA, 16 bp, Homo Sapiens
gtcccggcggagtcgc

SEQ ID NO: 49844 - DNA, 17 bp, Homo Sapiens
gtcccggcggagtcgcc

SEQ ID NO: 49845 - DNA, 18 bp, Homo Sapiens
gtcccggcggagtcgcca

SEQ ID NO: 49846 - DNA, 29 bp, Homo Sapiens
gtccctggttcgatcccgggtttcggcac

SEQ ID NO: 49847 - DNA, 30 bp, Homo Sapiens
gtccctggttcgatcccgggtttcggcacc

SEQ ID NO: 49848 - DNA, 31 bp, Homo Sapiens
gtccctggttcgatcccgggtttcggcacca

SEQ ID NO: 49849 - DNA, 16 bp, Homo Sapiens
gtccctgttcgggcgc

SEQ ID NO: 49850 - DNA, 17 bp, Homo Sapiens
gtccctgttcgggcgcc

SEQ ID NO: 49851 - DNA, 18 bp, Homo Sapiens
gtccctgttcgggcgcca

SEQ ID NO: 49852 - DNA, 16 bp, Homo Sapiens
gtcccttcgtggtcgc

SEQ ID NO: 49853 - DNA, 17 bp, Homo Sapiens
gtcccttcgtggtcgcc

SEQ ID NO: 49854 - DNA, 18 bp, Homo Sapiens
gtcccttcgtggtcgcca

SEQ ID NO: 49855 - DNA, 18 bp, Homo Sapiens
gtccgtgcgagaatacca

SEQ ID NO: 49856 - DNA, 16 bp, Homo Sapiens
gtcctgccgcggtcgc

SEQ ID NO: 49857 - DNA, 17 bp, Homo Sapiens
gtcctgccgcggtcgcc

SEQ ID NO: 49858 - DNA, 18 bp, Homo Sapiens
gtcctgccgcggtcgcca

SEQ ID NO: 49859 - DNA, 16 bp, Homo Sapiens
gtcctgggttcgagcc

SEQ ID NO: 49860 - DNA, 17 bp, Homo Sapiens
gtcctgggttcgagccc

SEQ ID NO: 49861 - DNA, 30 bp, Homo Sapiens; identical to SEQ ID NO: 20796

SEQ ID NO: 49862 - DNA, 17 bp, Homo Sapiens
gtccttgtagtataaac

SEQ ID NO: 49863 - DNA, 18 bp, Homo Sapiens
gtccttgtagtataaact

SEQ ID NO: 49864 - DNA, 26 bp, Homo Sapiens
gtccttgtagtataaactaatacacc

SEQ ID NO: 49865 - DNA, 28 bp, Homo Sapiens
gtccttgtagtataaactaatacaccag

SEQ ID NO: 49866 - DNA, 29 bp, Homo Sapiens
gtccttgtagtataaactaatacaccagt

SEQ ID NO: 49867 - DNA, 28 bp, Homo Sapiens
gtcgcgggttcgatccccgtacgggcca

SEQ ID NO: 49868 - DNA, 30 bp, Homo Sapiens; identical to SEQ ID NO: 20845

SEQ ID NO: 49869 - DNA, 29 bp, Homo Sapiens
gtcgctggttcgaatccggctcgaaggac

SEQ ID NO: 49870 - DNA, 30 bp, Homo Sapiens; identical to SEQ ID NO: 20847

SEQ ID NO: 49871 - DNA, 31 bp, Homo Sapiens; identical to SEQ ID NO: 20848

SEQ ID NO: 49872 - DNA, 29 bp, Homo Sapiens
gtcgctggttcgattccggctcgaaggac

SEQ ID NO: 49873 - DNA, 30 bp, Homo Sapiens; identical to SEQ ID NO: 20854

SEQ ID NO: 49874 - DNA, 31 bp, Homo Sapiens; identical to SEQ ID NO: 20855

SEQ ID NO: 49875 - DNA, 18 bp, Homo Sapiens
gtcggtagagcataagac

SEQ ID NO: 49876 - DNA, 16 bp, Homo Sapiens
gtcggtagagcatcag

SEQ ID NO: 49877 - DNA, 18 bp, Homo Sapiens
gtcggtagagcatcagac

SEQ ID NO: 49878 - DNA, 19 bp, Homo Sapiens
gtcggtagagcatcagact

SEQ ID NO: 49879 - DNA, 17 bp, Homo Sapiens
gtcggtagagcatgaga

SEQ ID NO: 49880 - DNA, 18 bp, Homo Sapiens
gtcggtagagcatgagac

SEQ ID NO: 49881 - DNA, 19 bp, Homo Sapiens
gtcggtagagcatgagacc

SEQ ID NO: 49882 - DNA, 19 bp, Homo Sapiens
gtcggtagagcatgagact

SEQ ID NO: 49883 - DNA, 20 bp, Homo Sapiens
gtcggtagagcatgagactc

SEQ ID NO: 49884 - DNA, 25 bp, Homo Sapiens
gtcggtagagcatgagactcttaat

SEQ ID NO: 49885 - DNA, 26 bp, Homo Sapiens
gtcggtagagcatgagactcttaatc

SEQ ID NO: 49886 - DNA, 27 bp, Homo Sapiens
gtcggtagagcatgagactcttaatct

SEQ ID NO: 49887 - DNA, 28 bp, Homo Sapiens
gtcggtagagcatgagactcttaatctc

SEQ ID NO: 49888 - DNA, 38 bp, Homo Sapiens; identical to SEQ ID NO: 20891

SEQ ID NO: 49889 - DNA, 16 bp, Homo Sapiens
gtcggtagagcatggg

SEQ ID NO: 49890 - DNA, 17 bp, Homo Sapiens
gtcggtagagcatggga

SEQ ID NO: 49891 - DNA, 18 bp, Homo Sapiens
gtcggtagagcatgggac

SEQ ID NO: 49892 - DNA, 19 bp, Homo Sapiens
gtcggtagagcatgggact

SEQ ID NO: 49893 - DNA, 20 bp, Homo Sapiens
gtcggtagagcatgggactc

SEQ ID NO: 49894 - DNA, 21 bp, Homo Sapiens
gtcggtagagcatgggactct

SEQ ID NO: 49895 - DNA, 25 bp, Homo Sapiens
gtcggtagagcatgggactcttaat

SEQ ID NO: 49896 - DNA, 26 bp, Homo Sapiens
gtcggtagagcatgggactcttaatc

SEQ ID NO: 49897 - DNA, 27 bp, Homo Sapiens
gtcggtagagcatgggactcttaatcc

SEQ ID NO: 49898 - DNA, 28 bp, Homo Sapiens
gtcggtagagcatgggactcttaatccc

SEQ ID NO: 49899 - DNA, 29 bp, Homo Sapiens
gtcggtagagcatgggactcttaatccca

SEQ ID NO: 49900 - DNA, 38 bp, Homo Sapiens; identical to SEQ ID NO: 20914

SEQ ID NO: 49901 - DNA, 40 bp, Homo Sapiens; identical to SEQ ID NO: 20916

SEQ ID NO: 49902 - DNA, 27 bp, Homo Sapiens
gtcgtgggttcgagccccacgttgggc

SEQ ID NO: 49903 - DNA, 28 bp, Homo Sapiens
gtcgtgggttcgagccccacgttgggcg

SEQ ID NO: 49904 - DNA, 29 bp, Homo Sapiens
gtcgtgggttcgagccccacgttgggcgc

SEQ ID NO: 49905 - DNA, 30 bp, Homo Sapiens; identical to SEQ ID NO: 20938

SEQ ID NO: 49906 - DNA, 27 bp, Homo Sapiens
gtcgtggttgtagtccgtgcgagaata

SEQ ID NO: 49907 - DNA, 29 bp, Homo Sapiens
gtcgtggttgtagtccgtgcgagaatacc

SEQ ID NO: 49908 - DNA, 30 bp, Homo Sapiens; identical to SEQ ID NO: 20954

SEQ ID NO: 49909 - DNA, 16 bp, Homo Sapiens
gtctagcggttaggat

SEQ ID NO: 49910 - DNA, 17 bp, Homo Sapiens
gtctagcggttaggatt

SEQ ID NO: 49911 - DNA, 21 bp, Homo Sapiens
gtctagcggttaggattcctg

SEQ ID NO: 49912 - DNA, 23 bp, Homo Sapiens
gtctagcggttaggattcctggt

SEQ ID NO: 49913 - DNA, 19 bp, Homo Sapiens
gtctaggggtatgattctc

SEQ ID NO: 49914 - DNA, 23 bp, Homo Sapiens
gtctaggggtatgattctcgctt

SEQ ID NO: 49915 - DNA, 17 bp, Homo Sapiens
gtctagtggttaggatt

SEQ ID NO: 49916 - DNA, 19 bp, Homo Sapiens
gtctagtggttaggattcg

SEQ ID NO: 49917 - DNA, 20 bp, Homo Sapiens
gtctagtggttaggattcgg

SEQ ID NO: 49918 - DNA, 21 bp, Homo Sapiens
gtctagtggttaggattcggc

SEQ ID NO: 49919 - DNA, 22 bp, Homo Sapiens
gtctagtggttaggattcggcg

SEQ ID NO: 49920 - DNA, 23 bp, Homo Sapiens
gtctagtggttaggattcggcgc

SEQ ID NO: 49921 - DNA, 24 bp, Homo Sapiens
gtctagtggttaggattcggcgct

SEQ ID NO: 49922 - DNA, 25 bp, Homo Sapiens
gtctagtggttaggattcggcgctc

SEQ ID NO: 49923 - DNA, 26 bp, Homo Sapiens
gtctagtggttaggattcggcgctct

SEQ ID NO: 49924 - DNA, 22 bp, Homo Sapiens
gtctcataatctgaaggtcctg

SEQ ID NO: 49925 - DNA, 16 bp, Homo Sapiens
gtctcggtggaacctc

SEQ ID NO: 49926 - DNA, 17 bp, Homo Sapiens
gtctcggtggaacctcc

SEQ ID NO: 49927 - DNA, 18 bp, Homo Sapiens
gtctcggtggaacctcca

SEQ ID NO: 49928 - DNA, 20 bp, Homo Sapiens
gtctctgtggcgcaatggac

SEQ ID NO: 49929 - DNA, 16 bp, Homo Sapiens
gtgaatctgacaacag

SEQ ID NO: 49930 - DNA, 29 bp, Homo Sapiens
gtgaatctgacaacagaggcttacgaccc

SEQ ID NO: 49931 - DNA, 40 bp, Homo Sapiens; identical to SEQ ID NO: 21097

SEQ ID NO: 49932 - DNA, 41 bp, Homo Sapiens; identical to SEQ ID NO: 21098

SEQ ID NO: 49933 - DNA, 42 bp, Homo Sapiens; identical to SEQ ID NO: 21099

SEQ ID NO: 49934 - DNA, 36 bp, Homo Sapiens; identical to SEQ ID NO: 21101

SEQ ID NO: 49935 - DNA, 16 bp, Homo Sapiens
gtgagtatccccgcct

SEQ ID NO: 49936 - DNA, 19 bp, Homo Sapiens
gtgagtatccccgcctgtc

SEQ ID NO: 49937 - DNA, 21 bp, Homo Sapiens
gtgagtatccccgcctgtcac

SEQ ID NO: 49938 - DNA, 26 bp, Homo Sapiens
gtgagtatccccgcctgtcacgcggg

SEQ ID NO: 49939 - DNA, 27 bp, Homo Sapiens
gtgagtatccccgcctgtcacgcggga

SEQ ID NO: 49940 - DNA, 27 bp, Homo Sapiens
gtgatcgtatagtggttagtactctgc

SEQ ID NO: 49941 - DNA, 28 bp, Homo Sapiens
gtgatcgtatagtggttagtactctgcg

SEQ ID NO: 49942 - DNA, 29 bp, Homo Sapiens
gtgatcgtatagtggttagtactctgcgt

SEQ ID NO: 49943 - DNA, 30 bp, Homo Sapiens; identical to SEQ ID NO: 21138

SEQ ID NO: 49944 - DNA, 32 bp, Homo Sapiens; identical to SEQ ID NO: 21140

SEQ ID NO: 49945 - DNA, 24 bp, Homo Sapiens
gtgcaactccaaataaaagtacca

SEQ ID NO: 49946 - DNA, 21 bp, Homo Sapiens
gtgcagtggtagaattctcgc

SEQ ID NO: 49947 - DNA, 23 bp, Homo Sapiens
gtgcagtggtagaattctcgcct

SEQ ID NO: 49948 - DNA, 35 bp, Homo Sapiens; identical to SEQ ID NO: 21175

SEQ ID NO: 49949 - DNA, 36 bp, Homo Sapiens; identical to SEQ ID NO: 21176

SEQ ID NO: 49950 - DNA, 37 bp, Homo Sapiens; identical to SEQ ID NO: 21177

SEQ ID NO: 49951 - DNA, 18 bp, Homo Sapiens
gtgctgggcccataaccc

SEQ ID NO: 49952 - DNA, 29 bp, Homo Sapiens
gtgctgggcccataacccagaggtcgatg

SEQ ID NO: 49953 - DNA, 33 bp, Homo Sapiens; identical to SEQ ID NO: 21186

SEQ ID NO: 49954 - DNA, 39 bp, Homo Sapiens; identical to SEQ ID NO: 39376

SEQ ID NO: 49955 - DNA, 40 bp, Homo Sapiens; identical to SEQ ID NO: 21196

SEQ ID NO: 49956 - DNA, 41 bp, Homo Sapiens; identical to SEQ ID NO: 21197

SEQ ID NO: 49957 - DNA, 26 bp, Homo Sapiens
gtggagttaaagactttttctctgac

SEQ ID NO: 49958 - DNA, 27 bp, Homo Sapiens
gtggagttaaagactttttctctgacc

SEQ ID NO: 49959 - DNA, 28 bp, Homo Sapiens
gtggagttaaagactttttctctgacca

SEQ ID NO: 49960 - DNA, 18 bp, Homo Sapiens
gtggcacggagaattttg

SEQ ID NO: 49961 - DNA, 33 bp, Homo Sapiens
gtggcacggagaattttggattctcagggatgg

SEQ ID NO: 49962 - DNA, 17 bp, Homo Sapiens
gtggccgagtggttaag

SEQ ID NO: 49963 - DNA, 16 bp, Homo Sapiens
gtggccgcagcaacct

SEQ ID NO: 49964 - DNA, 25 bp, Homo Sapiens
gtggcgcagcggaagcgtgctgggc

SEQ ID NO: 49965 - DNA, 16 bp, Homo Sapiens
gtggctaggattcggc

SEQ ID NO: 49966 - DNA, 18 bp, Homo Sapiens
gtgggtagagcatcagac

SEQ ID NO: 49967 - DNA, 27 bp, Homo Sapiens
gtgggttcgaatcccaccagagtcgcc

SEQ ID NO: 49968 - DNA, 27 bp, Homo Sapiens
gtgggttcgaatcccaccttcgtcgcc

SEQ ID NO: 49969 - DNA, 26 bp, Homo Sapiens
gtgggttcgaatcccatcctcgtcgc

SEQ ID NO: 49970 - DNA, 27 bp, Homo Sapiens
gtgggttcgaatcccatcctcgtcgcc

SEQ ID NO: 49971 - DNA, 28 bp, Homo Sapiens
gtgggttcgaatcccatcctcgtcgcca

SEQ ID NO: 49972 - DNA, 25 bp, Homo Sapiens
gtgggttcgagccccacgttgggcg

SEQ ID NO: 49973 - DNA, 26 bp, Homo Sapiens
gtgggttcgagccccacgttgggcgc

SEQ ID NO: 49974 - DNA, 27 bp, Homo Sapiens
gtgggttcgagccccacgttgggcgcc

SEQ ID NO: 49975 - DNA, 27 bp, Homo Sapiens
gtgggttcgagtcccaccagagtcgcc

SEQ ID NO: 49976 - DNA, 27 bp, Homo Sapiens
gtgggttcgagtcccatctgggtcgcc

SEQ ID NO: 49977 - DNA, 26 bp, Homo Sapiens
gtgggtttaagtcccattggtctagc

SEQ ID NO: 49978 - DNA, 16 bp, Homo Sapiens
gtggtagaattctcgc

SEQ ID NO: 49979 - DNA, 17 bp, Homo Sapiens
gtggtagaattctcgcc

SEQ ID NO: 49980 - DNA, 18 bp, Homo Sapiens
gtggtagaattctcgcct

SEQ ID NO: 49981 - DNA, 19 bp, Homo Sapiens
gtggtagaattctcgcctg

SEQ ID NO: 49982 - DNA, 20 bp, Homo Sapiens
gtggtagaattctcgcctgc

SEQ ID NO: 49983 - DNA, 21 bp, Homo Sapiens
gtggtagaattctcgcctgcc

SEQ ID NO: 49984 - DNA, 22 bp, Homo Sapiens
gtggtagaattctcgcctgcca

SEQ ID NO: 49985 - DNA, 23 bp, Homo Sapiens
gtggtagaattctcgcctgccac

SEQ ID NO: 49986 - DNA, 29 bp, Homo Sapiens
gtggtagaattctcgcctgccacgcggga

SEQ ID NO: 49987 - DNA, 34 bp, Homo Sapiens; identical to SEQ ID NO: 21294

SEQ ID NO: 49988 - DNA, 38 bp, Homo Sapiens; identical to SEQ ID NO: 21297

SEQ ID NO: 49989 - DNA, 16 bp, Homo Sapiens
gtggtagagcatttga

SEQ ID NO: 49990 - DNA, 18 bp, Homo Sapiens
gtggtagagcatttgact

SEQ ID NO: 49991 - DNA, 20 bp, Homo Sapiens
gtggtagagcatttgactgc

SEQ ID NO: 49992 - DNA, 17 bp, Homo Sapiens
gtggtagagcgcatgct

SEQ ID NO: 49993 - DNA, 16 bp, Homo Sapiens
gtggtagagcgcgtgc

SEQ ID NO: 49994 - DNA, 17 bp, Homo Sapiens
gtggtagagcgcgtgct

SEQ ID NO: 49995 - DNA, 16 bp, Homo Sapiens
gtggtatcatgcaaga

SEQ ID NO: 49996 - DNA, 17 bp, Homo Sapiens
gtggtatcatgcaagat

SEQ ID NO: 49997 - DNA, 18 bp, Homo Sapiens
gtggtatcatgcaagatt

SEQ ID NO: 49998 - DNA, 16 bp, Homo Sapiens
gtggtatgattctcgc

SEQ ID NO: 49999 - DNA, 17 bp, Homo Sapiens
gtggtatgattctcgct

SEQ ID NO: 50000 - DNA, 17 bp, Homo Sapiens
gtggtcatcacgttcgc

SEQ ID NO: 50001 - DNA, 19 bp, Homo Sapiens
gtggtcatcacgttcgcct

SEQ ID NO: 50002 - DNA, 19 bp, Homo Sapiens
gtggtctagtggttaggat

SEQ ID NO: 50003 - DNA, 22 bp, Homo Sapiens
gtggtctagtggttaggattcg

SEQ ID NO: 50004 - DNA, 24 bp, Homo Sapiens
gtggtctagtggttaggattcggc

SEQ ID NO: 50005 - DNA, 25 bp, Homo Sapiens
gtggtctagtggttaggattcggcg

SEQ ID NO: 50006 - DNA, 26 bp, Homo Sapiens
gtggtctagtggttaggattcggcgc

SEQ ID NO: 50007 - DNA, 27 bp, Homo Sapiens
gtggtctagtggttaggattcggcgct

SEQ ID NO: 50008 - DNA, 28 bp, Homo Sapiens
gtggtctagtggttaggattcggcgctc

SEQ ID NO: 50009 - DNA, 29 bp, Homo Sapiens
gtggtctagtggttaggattcggcgctct

SEQ ID NO: 50010 - DNA, 30 bp, Homo Sapiens; identical to SEQ ID NO: 21358

SEQ ID NO: 50011 - DNA, 17 bp, Homo Sapiens
gtggtgagtatccccgc

SEQ ID NO: 50012 - DNA, 18 bp, Homo Sapiens
gtggtgagtatccccgcc

SEQ ID NO: 50013 - DNA, 19 bp, Homo Sapiens
gtggtgagtatccccgcct

SEQ ID NO: 50014 - DNA, 22 bp, Homo Sapiens
gtggtgagtatccccgcctgtc

SEQ ID NO: 50015 - DNA, 24 bp, Homo Sapiens
gtggtgagtatccccgcctgtcac

SEQ ID NO: 50016 - DNA, 18 bp, Homo Sapiens
gtggttaaggcattggac

SEQ ID NO: 50017 - DNA, 16 bp, Homo Sapiens
gtggttaggattcggc

SEQ ID NO: 50018 - DNA, 17 bp, Homo Sapiens
gtggttaggattcggcg

SEQ ID NO: 50019 - DNA, 18 bp, Homo Sapiens
gtggttaggattcggcgc

SEQ ID NO: 50020 - DNA, 19 bp, Homo Sapiens
gtggttaggattcggcgct

SEQ ID NO: 50021 - DNA, 20 bp, Homo Sapiens
gtggttaggattcggcgctc

SEQ ID NO: 50022 - DNA, 21 bp, Homo Sapiens
gtggttaggattcggcgctct

SEQ ID NO: 50023 - DNA, 22 bp, Homo Sapiens
gtggttaggattcggcgctctc

SEQ ID NO: 50024 - DNA, 23 bp, Homo Sapiens
gtggttaggattcggcgctctca

SEQ ID NO: 50025 - DNA, 24 bp, Homo Sapiens
gtggttaggattcggcgctctcac

SEQ ID NO: 50026 - DNA, 25 bp, Homo Sapiens
gtggttaggattcggcgctctcacc

SEQ ID NO: 50027 - DNA, 28 bp, Homo Sapiens
gtggttaggattcggcgctctcaccgcc

SEQ ID NO: 50028 - DNA, 35 bp, Homo Sapiens; identical to SEQ ID NO: 21407

SEQ ID NO: 50029 - DNA, 39 bp, Homo Sapiens; identical to SEQ ID NO: 21411

SEQ ID NO: 50030 - DNA, 16 bp, Homo Sapiens
gtggttagtactctgc

SEQ ID NO: 50031 - DNA, 17 bp, Homo Sapiens
gtggttagtactctgcg

SEQ ID NO: 50032 - DNA, 18 bp, Homo Sapiens
gtggttagtactctgcgt

SEQ ID NO: 50033 - DNA, 19 bp, Homo Sapiens
gtggttagtactctgcgtt

SEQ ID NO: 50034 - DNA, 20 bp, Homo Sapiens
gtggttagtactctgcgttg

SEQ ID NO: 50035 - DNA, 21 bp, Homo Sapiens
gtggttagtactctgcgttgt

SEQ ID NO: 50036 - DNA, 25 bp, Homo Sapiens
gtggttagtactctgcgttgtggcc

SEQ ID NO: 50037 - DNA, 30 bp, Homo Sapiens; identical to SEQ ID NO: 39471

SEQ ID NO: 50038 - DNA, 34 bp, Homo Sapiens; identical to SEQ ID NO: 21428

SEQ ID NO: 50039 - DNA, 35 bp, Homo Sapiens; identical to SEQ ID NO: 21429

SEQ ID NO: 50040 - DNA, 17 bp, Homo Sapiens
gtggttatcacgtctgc

SEQ ID NO: 50041 - DNA, 19 bp, Homo Sapiens
gtggttatcacgtctgctt

SEQ ID NO: 50042 - DNA, 20 bp, Homo Sapiens
gtggttatcacgtctgcttt

SEQ ID NO: 50043 - DNA, 21 bp, Homo Sapiens
gtggttatcacgtctgcttta

SEQ ID NO: 50044 - DNA, 16 bp, Homo Sapiens
gtggttatcacgttcg

SEQ ID NO: 50045 - DNA, 17 bp, Homo Sapiens
gtggttatcacgttcgc

SEQ ID NO: 50046 - DNA, 18 bp, Homo Sapiens
gtggttatcacgttcgcc

SEQ ID NO: 50047 - DNA, 19 bp, Homo Sapiens
gtggttatcacgttcgcct

SEQ ID NO: 50048 - DNA, 20 bp, Homo Sapiens
gtggttatcacgttcgcctc

SEQ ID NO: 50049 - DNA, 40 bp, Homo Sapiens
gtggttatcacgttcgcctcacacgcgaaaggtccccggt

SEQ ID NO: 50050 - DNA, 21 bp, Homo Sapiens
gtggttcagtggtagaattct

SEQ ID NO: 50051 - DNA, 23 bp, Homo Sapiens
gtggttcagtggtagaattctcg

SEQ ID NO: 50052 - DNA, 24 bp, Homo Sapiens
gtggttcagtggtagaattctcgc

SEQ ID NO: 50053 - DNA, 25 bp, Homo Sapiens
gtggttcagtggtagaattctcgcc

SEQ ID NO: 50054 - DNA, 26 bp, Homo Sapiens
gtggttcagtggtagaattctcgcct

SEQ ID NO: 50055 - DNA, 28 bp, Homo Sapiens
gtggttcagtggtagaattctcgcctgc

SEQ ID NO: 50056 - DNA, 29 bp, Homo Sapiens
gtggttcagtggtagaattctcgcctgcc

SEQ ID NO: 50057 - DNA, 30 bp, Homo Sapiens; identical to SEQ ID NO: 21489

SEQ ID NO: 50058 - DNA, 31 bp, Homo Sapiens; identical to SEQ ID NO: 21490

SEQ ID NO: 50059 - DNA, 42 bp, Homo Sapiens; identical to SEQ ID NO: 21493

SEQ ID NO: 50060 - DNA, 44 bp, Homo Sapiens; identical to SEQ ID NO: 21494

SEQ ID NO: 50061 - DNA, 26 bp, Homo Sapiens
gtggttcgagcccacccagggacgcc

SEQ ID NO: 50062 - DNA, 17 bp, Homo Sapiens
gtggttgtagtccgtgc

SEQ ID NO: 50063 - DNA, 18 bp, Homo Sapiens
gtggttgtagtccgtgcg

SEQ ID NO: 50064 - DNA, 20 bp, Homo Sapiens
gtggttgtagtccgtgcgag

SEQ ID NO: 50065 - DNA, 21 bp, Homo Sapiens
gtggttgtagtccgtgcgaga

SEQ ID NO: 50066 - DNA, 22 bp, Homo Sapiens
gtggttgtagtccgtgcgagaa

SEQ ID NO: 50067 - DNA, 23 bp, Homo Sapiens
gtggttgtagtccgtgcgagaat

SEQ ID NO: 50068 - DNA, 24 bp, Homo Sapiens
gtggttgtagtccgtgcgagaata

SEQ ID NO: 50069 - DNA, 25 bp, Homo Sapiens
gtggttgtagtccgtgcgagaatac

SEQ ID NO: 50070 - DNA, 26 bp, Homo Sapiens
gtggttgtagtccgtgcgagaatacc

SEQ ID NO: 50071 - DNA, 27 bp, Homo Sapiens
gtggttgtagtccgtgcgagaatacca

SEQ ID NO: 50072 - DNA, 20 bp, Homo Sapiens
gtgtaatggtgagcactctg

SEQ ID NO: 50073 - DNA, 20 bp, Homo Sapiens
gtgtaatggttagcactctg

SEQ ID NO: 50074 - DNA, 21 bp, Homo Sapiens
gtgtaatggttagcactctgg

SEQ ID NO: 50075 - DNA, 22 bp, Homo Sapiens
gtgtaatggttagcactctgga

SEQ ID NO: 50076 - DNA, 24 bp, Homo Sapiens
gtgtaatggttagcactctggact

SEQ ID NO: 50077 - DNA, 25 bp, Homo Sapiens
gtgtaatggttagcactctggactc

SEQ ID NO: 50078 - DNA, 26 bp, Homo Sapiens
gtgtaatggttagcactctggactct

SEQ ID NO: 50079 - DNA, 31 bp, Homo Sapiens; identical to SEQ ID NO: 21537

SEQ ID NO: 50080 - DNA, 32 bp, Homo Sapiens; identical to SEQ ID NO: 21538

SEQ ID NO: 50081 - DNA, 44 bp, Homo Sapiens; identical to SEQ ID NO: 21544

SEQ ID NO: 50082 - DNA, 45 bp, Homo Sapiens; identical to SEQ ID NO: 21545

SEQ ID NO: 50083 - DNA, 31 bp, Homo Sapiens
gtgtaatggttagcactctggactttgaatc

SEQ ID NO: 50084 - DNA, 32 bp, Homo Sapiens; identical to SEQ ID NO: 21550

SEQ ID NO: 50085 - DNA, 16 bp, Homo Sapiens
gtgtagtggtatcatg

SEQ ID NO: 50086 - DNA, 23 bp, Homo Sapiens
gtgtagtggtatcatgcaagatt

SEQ ID NO: 50087 - DNA, 41 bp, Homo Sapiens; identical to SEQ ID NO: 21569

SEQ ID NO: 50088 - DNA, 43 bp, Homo Sapiens; identical to SEQ ID NO: 21571

SEQ ID NO: 50089 - DNA, 22 bp, Homo Sapiens
gtgtagtggttatcacgttcgc

SEQ ID NO: 50090 - DNA, 23 bp, Homo Sapiens
gtgtagtggttatcacgttcgcc

SEQ ID NO: 50091 - DNA, 24 bp, Homo Sapiens
gtgtagtggttatcacgttcgcct

SEQ ID NO: 50092 - DNA, 25 bp, Homo Sapiens
gtgtagtggttatcacgttcgcctc

SEQ ID NO: 50093 - DNA, 16 bp, Homo Sapiens
gtgtgaggtcccgggt

SEQ ID NO: 50094 - DNA, 22 bp, Homo Sapiens
gtgtgataggtggcacggagaa

SEQ ID NO: 50095 - DNA, 25 bp, Homo Sapiens
gtgttcaagtcacgtcggggtcacc

SEQ ID NO: 50096 - DNA, 21 bp, Homo Sapiens
gtgttcgaatcacgtcggggt

SEQ ID NO: 50097 - DNA, 25 bp, Homo Sapiens
gtgttcgaatcacgtcggggtcacc

SEQ ID NO: 50098 - DNA, 32 bp, Homo Sapiens; identical to SEQ ID NO: 21621

SEQ ID NO: 50099 - DNA, 33 bp, Homo Sapiens; identical to SEQ ID NO: 21622

SEQ ID NO: 50100 - DNA, 17 bp, Homo Sapiens
gttaaagactttttctc

SEQ ID NO: 50101 - DNA, 18 bp, Homo Sapiens
gttaaagactttttctct

SEQ ID NO: 50102 - DNA, 20 bp, Homo Sapiens
gttaaagactttttctctga

SEQ ID NO: 50103 - DNA, 21 bp, Homo Sapiens
gttaaagactttttctctgac

SEQ ID NO: 50104 - DNA, 22 bp, Homo Sapiens
gttaaagactttttctctgacc

SEQ ID NO: 50105 - DNA, 23 bp, Homo Sapiens
gttaaagactttttctctgacca

SEQ ID NO: 50106 - DNA, 19 bp, Homo Sapiens
gttaaagattaagagaacc

SEQ ID NO: 50107 - DNA, 39 bp, Homo Sapiens; identical to SEQ ID NO: 21655

SEQ ID NO: 50108 - DNA, 40 bp, Homo Sapiens; identical to SEQ ID NO: 21656

SEQ ID NO: 50109 - DNA, 16 bp, Homo Sapiens
gttaagatggcagagc

SEQ ID NO: 50110 - DNA, 17 bp, Homo Sapiens
gttaagatggcagagcc

SEQ ID NO: 50111 - DNA, 18 bp, Homo Sapiens
gttaagatggcagagccc

SEQ ID NO: 50112 - DNA, 19 bp, Homo Sapiens
gttaagatggcagagcccg

SEQ ID NO: 50113 - DNA, 20 bp, Homo Sapiens
gttaagatggcagagcccgg

SEQ ID NO: 50114 - DNA, 21 bp, Homo Sapiens
gttaagatggcagagcccggt

SEQ ID NO: 50115 - DNA, 22 bp, Homo Sapiens
gttaagatggcagagcccggta

SEQ ID NO: 50116 - DNA, 23 bp, Homo Sapiens
gttaagatggcagagcccggtaa

SEQ ID NO: 50117 - DNA, 25 bp, Homo Sapiens
gttaagatggcagagcccggtaatc

SEQ ID NO: 50118 - DNA, 28 bp, Homo Sapiens
gttaagatggcagagcccggtaatcgca

SEQ ID NO: 50119 - DNA, 29 bp, Homo Sapiens
gttaagatggcagagcccggtaatcgcat

SEQ ID NO: 50120 - DNA, 30 bp, Homo Sapiens; identical to SEQ ID NO: 21718

SEQ ID NO: 50121 - DNA, 31 bp, Homo Sapiens; identical to SEQ ID NO: 21719

SEQ ID NO: 50122 - DNA, 32 bp, Homo Sapiens; identical to SEQ ID NO: 21720

SEQ ID NO: 50123 - DNA, 35 bp, Homo Sapiens; identical to SEQ ID NO: 21723

SEQ ID NO: 50124 - DNA, 37 bp, Homo Sapiens; identical to SEQ ID NO: 21725

SEQ ID NO: 50125 - DNA, 42 bp, Homo Sapiens; identical to SEQ ID NO: 21730

SEQ ID NO: 50126 - DNA, 43 bp, Homo Sapiens; identical to SEQ ID NO: 21731

SEQ ID NO: 50127 - DNA, 44 bp, Homo Sapiens; identical to SEQ ID NO: 21732

SEQ ID NO: 50128 - DNA, 45 bp, Homo Sapiens; identical to SEQ ID NO: 21733

SEQ ID NO: 50129 - DNA, 46 bp, Homo Sapiens; identical to SEQ ID NO: 21734

SEQ ID NO: 50130 - DNA, 16 bp, Homo Sapiens
gttagcactctggact

SEQ ID NO: 50131 - DNA, 17 bp, Homo Sapiens
gttagcactctggactc

SEQ ID NO: 50132 - DNA, 21 bp, Homo Sapiens
gttagcactctggactctgaa

SEQ ID NO: 50133 - DNA, 22 bp, Homo Sapiens
gttagcactctggactctgaat

SEQ ID NO: 50134 - DNA, 23 bp, Homo Sapiens
gttagcactctggactctgaatc

SEQ ID NO: 50135 - DNA, 24 bp, Homo Sapiens
gttagcactctggactctgaatcc

SEQ ID NO: 50136 - DNA, 25 bp, Homo Sapiens
gttagcactctggactctgaatcca

SEQ ID NO: 50137 - DNA, 27 bp, Homo Sapiens
gttagcactctggactctgaatccagc

SEQ ID NO: 50138 - DNA, 28 bp, Homo Sapiens
gttagcactctggactctgaatccagcg

SEQ ID NO: 50139 - DNA, 35 bp, Homo Sapiens; identical to SEQ ID NO: 21756

SEQ ID NO: 50140 - DNA, 39 bp, Homo Sapiens; identical to SEQ ID NO: 21760

SEQ ID NO: 50141 - DNA, 23 bp, Homo Sapiens
gttagcactctggactttgaatc

SEQ ID NO: 50142 - DNA, 24 bp, Homo Sapiens
gttagcactctggactttgaatcc

SEQ ID NO: 50143 - DNA, 16 bp, Homo Sapiens
gttaggattcctggtt

SEQ ID NO: 50144 - DNA, 26 bp, Homo Sapiens
gttaggattcctggttttcacccagg

SEQ ID NO: 50145 - DNA, 16 bp, Homo Sapiens
gttaggattcggcgct

SEQ ID NO: 50146 - DNA, 17 bp, Homo Sapiens
gttaggattcggcgctc

SEQ ID NO: 50147 - DNA, 18 bp, Homo Sapiens
gttaggattcggcgctct

SEQ ID NO: 50148 - DNA, 19 bp, Homo Sapiens
gttaggattcggcgctctc

SEQ ID NO: 50149 - DNA, 22 bp, Homo Sapiens
gttaggattcggcgctctcacc

SEQ ID NO: 50150 - DNA, 23 bp, Homo Sapiens
gttaggattcggcgctctcaccg

SEQ ID NO: 50151 - DNA, 25 bp, Homo Sapiens
gttaggattcggcgctctcaccgcc

SEQ ID NO: 50152 - DNA, 32 bp, Homo Sapiens; identical to SEQ ID NO: 21797

SEQ ID NO: 50153 - DNA, 21 bp, Homo Sapiens
gttaggcctctttttaccacc

SEQ ID NO: 50154 - DNA, 16 bp, Homo Sapiens
gttagtactctgcgtt

SEQ ID NO: 50155 - DNA, 18 bp, Homo Sapiens
gttagtactctgcgttgt

SEQ ID NO: 50156 - DNA, 27 bp, Homo Sapiens
gttagtactctgcgttgtggccgcagc

SEQ ID NO: 50157 - DNA, 31 bp, Homo Sapiens; identical to SEQ ID NO: 21821

SEQ ID NO: 50158 - DNA, 32 bp, Homo Sapiens; identical to SEQ ID NO: 21822

SEQ ID NO: 50159 - DNA, 23 bp, Homo Sapiens
gttatacccttcccgtactacca

SEQ ID NO: 50160 - DNA, 16 bp, Homo Sapiens
gttatcacgtctgctt

SEQ ID NO: 50161 - DNA, 17 bp, Homo Sapiens
gttatcacgtctgcttt

SEQ ID NO: 50162 - DNA, 16 bp, Homo Sapiens
gttatcacgttcgcct

SEQ ID NO: 50163 - DNA, 23 bp, Homo Sapiens
gttcaaatcacgtcggggtcacc

SEQ ID NO: 50164 - DNA, 16 bp, Homo Sapiens
gttcaaatcccggacg

SEQ ID NO: 50165 - DNA, 17 bp, Homo Sapiens
gttcaaatcccggacga

SEQ ID NO: 50166 - DNA, 18 bp, Homo Sapiens
gttcaaatcccggacgag

SEQ ID NO: 50167 - DNA, 19 bp, Homo Sapiens
gttcaaatcccggacgagc

SEQ ID NO: 50168 - DNA, 20 bp, Homo Sapiens
gttcaaatcccggacgagcc

SEQ ID NO: 50169 - DNA, 21 bp, Homo Sapiens
gttcaaatcccggacgagccc

SEQ ID NO: 50170 - DNA, 22 bp, Homo Sapiens
gttcaaatcccggacgagcccc

SEQ ID NO: 50171 - DNA, 23 bp, Homo Sapiens
gttcaaatcccggacgagccccc

SEQ ID NO: 50172 - DNA, 24 bp, Homo Sapiens
gttcaaatcccggacgagccccca

SEQ ID NO: 50173 - DNA, 16 bp, Homo Sapiens
gttcaaatccgggtgc

SEQ ID NO: 50174 - DNA, 17 bp, Homo Sapiens
gttcaaatccgggtgcc

SEQ ID NO: 50175 - DNA, 18 bp, Homo Sapiens
gttcaaatccgggtgccc

SEQ ID NO: 50176 - DNA, 19 bp, Homo Sapiens
gttcaaatccgggtgcccc

SEQ ID NO: 50177 - DNA, 20 bp, Homo Sapiens
gttcaaatccgggtgccccc

SEQ ID NO: 50178 - DNA, 21 bp, Homo Sapiens
gttcaaatccgggtgccccct

SEQ ID NO: 50179 - DNA, 22 bp, Homo Sapiens
gttcaaatccgggtgccccctc

SEQ ID NO: 50180 - DNA, 23 bp, Homo Sapiens
gttcaaatccgggtgccccctcc

SEQ ID NO: 50181 - DNA, 21 bp, Homo Sapiens
gttcaaatctcgctggggcct

SEQ ID NO: 50182 - DNA, 22 bp, Homo Sapiens
gttcaaatctcgctggggcctc

SEQ ID NO: 50183 - DNA, 23 bp, Homo Sapiens
gttcaaatctcgctggggcctcc

SEQ ID NO: 50184 - DNA, 17 bp, Homo Sapiens
gttcaaatctcggtgga

SEQ ID NO: 50185 - DNA, 21 bp, Homo Sapiens
gttcaaatctcggtggaacct

SEQ ID NO: 50186 - DNA, 22 bp, Homo Sapiens
gttcaaatctcggtggaacctc

SEQ ID NO: 50187 - DNA, 23 bp, Homo Sapiens
gttcaaatctcggtggaacctcc

SEQ ID NO: 50188 - DNA, 24 bp, Homo Sapiens
gttcaaatctcggtggaacctcca

SEQ ID NO: 50189 - DNA, 18 bp, Homo Sapiens
gttcaaatctcggtggga

SEQ ID NO: 50190 - DNA, 21 bp, Homo Sapiens
gttcaaatctcggtgggacct

SEQ ID NO: 50191 - DNA, 22 bp, Homo Sapiens
gttcaaatctcggtgggacctc

SEQ ID NO: 50192 - DNA, 23 bp, Homo Sapiens
gttcaaatctcggtgggacctcc

SEQ ID NO: 50193 - DNA, 23 bp, Homo Sapiens
gttcaagtcacgtcggggtcacc

SEQ ID NO: 50194 - DNA, 20 bp, Homo Sapiens
gttcaagtccctgttcgggc

SEQ ID NO: 50195 - DNA, 21 bp, Homo Sapiens
gttcaagtccctgttcgggcg

SEQ ID NO: 50196 - DNA, 22 bp, Homo Sapiens
gttcaagtccctgttcgggcgc

SEQ ID NO: 50197 - DNA, 23 bp, Homo Sapiens
gttcaagtccctgttcgggcgcc

SEQ ID NO: 50198 - DNA, 24 bp, Homo Sapiens
gttcaagtccctgttcgggcgcca

SEQ ID NO: 50199 - DNA, 17 bp, Homo Sapiens
gttcaatccccagcacc

SEQ ID NO: 50200 - DNA, 16 bp, Homo Sapiens
gttcaatccccggcac

SEQ ID NO: 50201 - DNA, 17 bp, Homo Sapiens
gttcaatccccggcacc

SEQ ID NO: 50202 - DNA, 18 bp, Homo Sapiens
gttcaatccccggcacct

SEQ ID NO: 50203 - DNA, 21 bp, Homo Sapiens
gttcaatccccggcacctcca

SEQ ID NO: 50204 - DNA, 22 bp, Homo Sapiens
gttcaatccccggcacctccac

SEQ ID NO: 50205 - DNA, 23 bp, Homo Sapiens
gttcaatccccggcacctccacc

SEQ ID NO: 50206 - DNA, 24 bp, Homo Sapiens
gttcaatccccggcacctccacca

SEQ ID NO: 50207 - DNA, 17 bp, Homo Sapiens
gttcaatccccggcatc

SEQ ID NO: 50208 - DNA, 23 bp, Homo Sapiens
gttcaatccccggcatctccacc

SEQ ID NO: 50209 - DNA, 24 bp, Homo Sapiens
gttcaatccccggcatctccacca

SEQ ID NO: 50210 - DNA, 22 bp, Homo Sapiens
gttcaatcccgggtttcggcac

SEQ ID NO: 50211 - DNA, 18 bp, Homo Sapiens
gttcaattccccgacggg

SEQ ID NO: 50212 - DNA, 21 bp, Homo Sapiens
gttcaattccccgacggggag

SEQ ID NO: 50213 - DNA, 22 bp, Homo Sapiens
gttcaattccccgacggggagc

SEQ ID NO: 50214 - DNA, 23 bp, Homo Sapiens
gttcaattccccgacggggagcc

SEQ ID NO: 50215 - DNA, 24 bp, Homo Sapiens
gttcaattccccgacggggagcca

SEQ ID NO: 50216 - DNA, 18 bp, Homo Sapiens
gttcaggtcgcagtctcc

SEQ ID NO: 50217 - DNA, 19 bp, Homo Sapiens
gttcaggtcgcagtctccc

SEQ ID NO: 50218 - DNA, 19 bp, Homo Sapiens
gttcagtggtagaattctc

SEQ ID NO: 50219 - DNA, 20 bp, Homo Sapiens
gttcagtggtagaattctcg

SEQ ID NO: 50220 - DNA, 21 bp, Homo Sapiens
gttcagtggtagaattctcgc

SEQ ID NO: 50221 - DNA, 22 bp, Homo Sapiens
gttcagtggtagaattctcgcc

SEQ ID NO: 50222 - DNA, 23 bp, Homo Sapiens
gttcagtggtagaattctcgcct

SEQ ID NO: 50223 - DNA, 24 bp, Homo Sapiens
gttcagtggtagaattctcgcctg

SEQ ID NO: 50224 - DNA, 25 bp, Homo Sapiens
gttcagtggtagaattctcgcctgc

SEQ ID NO: 50225 - DNA, 26 bp, Homo Sapiens
gttcagtggtagaattctcgcctgcc

SEQ ID NO: 50226 - DNA, 27 bp, Homo Sapiens
gttcagtggtagaattctcgcctgcca

SEQ ID NO: 50227 - DNA, 28 bp, Homo Sapiens
gttcagtggtagaattctcgcctgccac

SEQ ID NO: 50228 - DNA, 39 bp, Homo Sapiens; identical to SEQ ID NO: 21949

SEQ ID NO: 50229 - DNA, 40 bp, Homo Sapiens; identical to SEQ ID NO: 21950

SEQ ID NO: 50230 - DNA, 41 bp, Homo Sapiens; identical to SEQ ID NO: 21951

SEQ ID NO: 50231 - DNA, 43 bp, Homo Sapiens; identical to SEQ ID NO: 21952

SEQ ID NO: 50232 - DNA, 30 bp, Homo Sapiens; identical to SEQ ID NO: 21980

SEQ ID NO: 50233 - DNA, 31 bp, Homo Sapiens; identical to SEQ ID NO: 21981

SEQ ID NO: 50234 - DNA, 32 bp, Homo Sapiens; identical to SEQ ID NO: 21982

SEQ ID NO: 50235 - DNA, 28 bp, Homo Sapiens
gttccatggtgtaatggttagcactctg

SEQ ID NO: 50236 - DNA, 32 bp, Homo Sapiens; identical to SEQ ID NO: 21997

SEQ ID NO: 50237 - DNA, 30 bp, Homo Sapiens; identical to SEQ ID NO: 22006

SEQ ID NO: 50238 - DNA, 16 bp, Homo Sapiens
gttcgaaaccgggcgg

SEQ ID NO: 50239 - DNA, 17 bp, Homo Sapiens
gttcgaaaccgggcgga

SEQ ID NO: 50240 - DNA, 21 bp, Homo Sapiens
gttcgaaaccgggcggaaaca

SEQ ID NO: 50241 - DNA, 22 bp, Homo Sapiens
gttcgaaaccgggcggaaacac

SEQ ID NO: 50242 - DNA, 23 bp, Homo Sapiens
gttcgaaaccgggcggaaacacc

SEQ ID NO: 50243 - DNA, 24 bp, Homo Sapiens
gttcgaaaccgggcggaaacacca

SEQ ID NO: 50244 - DNA, 16 bp, Homo Sapiens
gttcgaaccccactcc

SEQ ID NO: 50245 - DNA, 23 bp, Homo Sapiens
gttcgaaccccactcctggtacc

SEQ ID NO: 50246 - DNA, 24 bp, Homo Sapiens
gttcgaaccccactcctggtacca

SEQ ID NO: 50247 - DNA, 21 bp, Homo Sapiens
gttcgaaccccgtccgtgcct

SEQ ID NO: 50248 - DNA, 22 bp, Homo Sapiens
gttcgaaccccgtccgtgcctc

SEQ ID NO: 50249 - DNA, 23 bp, Homo Sapiens
gttcgaaccccgtccgtgcctcc

SEQ ID NO: 50250 - DNA, 24 bp, Homo Sapiens
gttcgaaccccgtccgtgcctcca

SEQ ID NO: 50251 - DNA, 23 bp, Homo Sapiens
gttcgaaccctgctcgctgcgcc

SEQ ID NO: 50252 - DNA, 23 bp, Homo Sapiens
gttcgaacctcagagggggcacc

SEQ ID NO: 50253 - DNA, 24 bp, Homo Sapiens
gttcgaacctcagagggggcacca

SEQ ID NO: 50254 - DNA, 22 bp, Homo Sapiens
gttcgaatcacgtcggggtcac

SEQ ID NO: 50255 - DNA, 23 bp, Homo Sapiens
gttcgaatcacgtcggggtcacc

SEQ ID NO: 50256 - DNA, 24 bp, Homo Sapiens
gttcgaatcacgtcggggtcacca

SEQ ID NO: 50257 - DNA, 23 bp, Homo Sapiens
gttcgaatcccaccagagtcgcc

SEQ ID NO: 50258 - DNA, 16 bp, Homo Sapiens
gttcgaatcccaccgc

SEQ ID NO: 50259 - DNA, 21 bp, Homo Sapiens
gttcgaatcccaccgctgcca

SEQ ID NO: 50260 - DNA, 22 bp, Homo Sapiens
gttcgaatcccaccgctgccac

SEQ ID NO: 50261 - DNA, 23 bp, Homo Sapiens
gttcgaatcccaccgctgccacc

SEQ ID NO: 50262 - DNA, 21 bp, Homo Sapiens
gttcgaatcccactcctgaca

SEQ ID NO: 50263 - DNA, 23 bp, Homo Sapiens
gttcgaatcccactcctgacacc

SEQ ID NO: 50264 - DNA, 24 bp, Homo Sapiens
gttcgaatcccactcctgacacca

SEQ ID NO: 50265 - DNA, 21 bp, Homo Sapiens
gttcgaatcccacttctgaca

SEQ ID NO: 50266 - DNA, 22 bp, Homo Sapiens
gttcgaatcccacttctgacac

SEQ ID NO: 50267 - DNA, 23 bp, Homo Sapiens
gttcgaatcccacttctgacacc

SEQ ID NO: 50268 - DNA, 16 bp, Homo Sapiens
gttcgaatcccagcgg

SEQ ID NO: 50269 - DNA, 20 bp, Homo Sapiens
gttcgaatcccagcggggcc

SEQ ID NO: 50270 - DNA, 21 bp, Homo Sapiens
gttcgaatcccagcggggcct

SEQ ID NO: 50271 - DNA, 22 bp, Homo Sapiens
gttcgaatcccagcggggcctc

SEQ ID NO: 50272 - DNA, 23 bp, Homo Sapiens
gttcgaatcccagcggggcctcc

SEQ ID NO: 50273 - DNA, 24 bp, Homo Sapiens
gttcgaatcccagcggggcctcca

SEQ ID NO: 50274 - DNA, 18 bp, Homo Sapiens
gttcgaatcccagcggtg

SEQ ID NO: 50275 - DNA, 21 bp, Homo Sapiens
gttcgaatcccagcggtgcct

SEQ ID NO: 50276 - DNA, 22 bp, Homo Sapiens
gttcgaatcccagcggtgcctc

SEQ ID NO: 50277 - DNA, 23 bp, Homo Sapiens
gttcgaatcccagcggtgcctcc

SEQ ID NO: 50278 - DNA, 21 bp, Homo Sapiens
gttcgaatcccagtagagcct

SEQ ID NO: 50279 - DNA, 22 bp, Homo Sapiens
gttcgaatcccatcctcgtcgc

SEQ ID NO: 50280 - DNA, 23 bp, Homo Sapiens
gttcgaatcccatcctcgtcgcc

SEQ ID NO: 50281 - DNA, 24 bp, Homo Sapiens
gttcgaatcccatcctcgtcgcca

SEQ ID NO: 50282 - DNA, 23 bp, Homo Sapiens
gttcgaatcccttcgtggttgcc

SEQ ID NO: 50283 - DNA, 20 bp, Homo Sapiens
gttcgaatccgagtcacggc

SEQ ID NO: 50284 - DNA, 22 bp, Homo Sapiens
gttcgaatccgagtcacggcac

SEQ ID NO: 50285 - DNA, 23 bp, Homo Sapiens
gttcgaatccgagtcacggcacc

SEQ ID NO: 50286 - DNA, 24 bp, Homo Sapiens
gttcgaatccgagtcacggcacca

SEQ ID NO: 50287 - DNA, 16 bp, Homo Sapiens
gttcgaatccggctcg

SEQ ID NO: 50288 - DNA, 22 bp, Homo Sapiens
gttcgaatccggctcgaaggac

SEQ ID NO: 50289 - DNA, 23 bp, Homo Sapiens
gttcgaatccggctcgaaggacc

SEQ ID NO: 50290 - DNA, 22 bp, Homo Sapiens
gttcgaatcctgccgactacgc

SEQ ID NO: 50291 - DNA, 23 bp, Homo Sapiens
gttcgaatcctgccgactacgcc

SEQ ID NO: 50292 - DNA, 20 bp, Homo Sapiens
gttcgaatcctgctcacagc

SEQ ID NO: 50293 - DNA, 21 bp, Homo Sapiens
gttcgaatcctgctcacagcg

SEQ ID NO: 50294 - DNA, 22 bp, Homo Sapiens
gttcgaatcctgctcacagcgc

SEQ ID NO: 50295 - DNA, 23 bp, Homo Sapiens
gttcgaatcctgctcacagcgcc

SEQ ID NO: 50296 - DNA, 23 bp, Homo Sapiens
gttcgaatcctgttcgtgacgcc

SEQ ID NO: 50297 - DNA, 16 bp, Homo Sapiens
gttcgactcccagcgg

SEQ ID NO: 50298 - DNA, 17 bp, Homo Sapiens
gttcgactcccggtatg

SEQ ID NO: 50299 - DNA, 19 bp, Homo Sapiens
gttcgactcccggtatggg

SEQ ID NO: 50300 - DNA, 20 bp, Homo Sapiens
gttcgactcccggtatggga

SEQ ID NO: 50301 - DNA, 21 bp, Homo Sapiens
gttcgactcccggtatgggaa

SEQ ID NO: 50302 - DNA, 22 bp, Homo Sapiens
gttcgactcccggtatgggaac

SEQ ID NO: 50303 - DNA, 23 bp, Homo Sapiens
gttcgactcccggtatgggaacc

SEQ ID NO: 50304 - DNA, 24 bp, Homo Sapiens
gttcgactcccggtatgggaacca

SEQ ID NO: 50305 - DNA, 16 bp, Homo Sapiens
gttcgactcccggtgt

SEQ ID NO: 50306 - DNA, 17 bp, Homo Sapiens
gttcgactcccggtgtg

SEQ ID NO: 50307 - DNA, 18 bp, Homo Sapiens
gttcgactcccggtgtgg

SEQ ID NO: 50308 - DNA, 19 bp, Homo Sapiens
gttcgactcccggtgtggg

SEQ ID NO: 50309 - DNA, 20 bp, Homo Sapiens
gttcgactcccggtgtggga

SEQ ID NO: 50310 - DNA, 21 bp, Homo Sapiens
gttcgactcccggtgtgggaa

SEQ ID NO: 50311 - DNA, 22 bp, Homo Sapiens
gttcgactcccggtgtgggaac

SEQ ID NO: 50312 - DNA, 23 bp, Homo Sapiens
gttcgactcccggtgtgggaacc

SEQ ID NO: 50313 - DNA, 24 bp, Homo Sapiens
gttcgactcccggtgtgggaacca

SEQ ID NO: 50314 - DNA, 22 bp, Homo Sapiens
gttcgactcctggctggctcgc

SEQ ID NO: 50315 - DNA, 23 bp, Homo Sapiens
gttcgactcctggctggctcgcc

SEQ ID NO: 50316 - DNA, 18 bp, Homo Sapiens
gttcgagcccacccaggg

SEQ ID NO: 50317 - DNA, 23 bp, Homo Sapiens
gttcgagcccacccagggacgcc

SEQ ID NO: 50318 - DNA, 24 bp, Homo Sapiens
gttcgagcccacccagggacgcca

SEQ ID NO: 50319 - DNA, 18 bp, Homo Sapiens
gttcgagccccacgttgg

SEQ ID NO: 50320 - DNA, 20 bp, Homo Sapiens
gttcgagccccacgttgggc

SEQ ID NO: 50321 - DNA, 21 bp, Homo Sapiens
gttcgagccccacgttgggcg

SEQ ID NO: 50322 - DNA, 22 bp, Homo Sapiens
gttcgagccccacgttgggcgc

SEQ ID NO: 50323 - DNA, 23 bp, Homo Sapiens
gttcgagccccacgttgggcgcc

SEQ ID NO: 50324 - DNA, 24 bp, Homo Sapiens
gttcgagccccacgttgggcgcca

SEQ ID NO: 50325 - DNA, 16 bp, Homo Sapiens
gttcgagccccagtgg

SEQ ID NO: 50326 - DNA, 17 bp, Homo Sapiens
gttcgagccccagtgga

SEQ ID NO: 50327 - DNA, 18 bp, Homo Sapiens
gttcgagccccagtggaa

SEQ ID NO: 50328 - DNA, 19 bp, Homo Sapiens
gttcgagccccagtggaac

SEQ ID NO: 50329 - DNA, 20 bp, Homo Sapiens
gttcgagccccagtggaacc

SEQ ID NO: 50330 - DNA, 21 bp, Homo Sapiens
gttcgagccccagtggaacca

SEQ ID NO: 50331 - DNA, 22 bp, Homo Sapiens
gttcgagccccagtggaaccac

SEQ ID NO: 50332 - DNA, 23 bp, Homo Sapiens
gttcgagccccagtggaaccacc

SEQ ID NO: 50333 - DNA, 24 bp, Homo Sapiens
gttcgagccccagtggaaccacca

SEQ ID NO: 50334 - DNA, 21 bp, Homo Sapiens
gttcgagcctcacacggggca

SEQ ID NO: 50335 - DNA, 22 bp, Homo Sapiens
gttcgagcctcacacggggcac

SEQ ID NO: 50336 - DNA, 24 bp, Homo Sapiens
gttcgagcctcacacggggcacca

SEQ ID NO: 50337 - DNA, 18 bp, Homo Sapiens
gttcgagcctcacctgga

SEQ ID NO: 50338 - DNA, 23 bp, Homo Sapiens
gttcgagcctcacctggagcacc

SEQ ID NO: 50339 - DNA, 24 bp, Homo Sapiens
gttcgagtcccacccggggtacca

SEQ ID NO: 50340 - DNA, 23 bp, Homo Sapiens
gttcgagtcccatctggggtgcc

SEQ ID NO: 50341 - DNA, 24 bp, Homo Sapiens
gttcgagtcccatctggggtgcca

SEQ ID NO: 50342 - DNA, 23 bp, Homo Sapiens
gttcgagtcccatctgggtcgcc

SEQ ID NO: 50343 - DNA, 24 bp, Homo Sapiens
gttcgagtcccatctgggtcgcca

SEQ ID NO: 50344 - DNA, 23 bp, Homo Sapiens
gttcgagtcccggcggagtcgcc

SEQ ID NO: 50345 - DNA, 22 bp, Homo Sapiens
gttcgagtcccttcgtggtcgc

SEQ ID NO: 50346 - DNA, 23 bp, Homo Sapiens
gttcgagtcccttcgtggtcgcc

SEQ ID NO: 50347 - DNA, 24 bp, Homo Sapiens
gttcgagtcccttcgtggtcgcca

SEQ ID NO: 50348 - DNA, 23 bp, Homo Sapiens
gttcgagtcctgccgcggtcgcc

SEQ ID NO: 50349 - DNA, 24 bp, Homo Sapiens
gttcgagtctcggtggaacctcca

SEQ ID NO: 50350 - DNA, 20 bp, Homo Sapiens
gttcgatccccagcatctcc

SEQ ID NO: 50351 - DNA, 21 bp, Homo Sapiens
gttcgatccccagcatctcca

SEQ ID NO: 50352 - DNA, 22 bp, Homo Sapiens
gttcgatccccagcatctccac

SEQ ID NO: 50353 - DNA, 23 bp, Homo Sapiens
gttcgatccccagcatctccacc

SEQ ID NO: 50354 - DNA, 24 bp, Homo Sapiens
gttcgatccccagcatctccacca

SEQ ID NO: 50355 - DNA, 22 bp, Homo Sapiens
gttcgatccccagtacctccac

SEQ ID NO: 50356 - DNA, 24 bp, Homo Sapiens
gttcgatccccagtacctccacca

SEQ ID NO: 50357 - DNA, 17 bp, Homo Sapiens
gttcgatccccggcacc

SEQ ID NO: 50358 - DNA, 23 bp, Homo Sapiens
gttcgatccccggcacctccacc

SEQ ID NO: 50359 - DNA, 17 bp, Homo Sapiens
gttcgatccccggcatc

SEQ ID NO: 50360 - DNA, 18 bp, Homo Sapiens
gttcgatccccggcatct

SEQ ID NO: 50361 - DNA, 19 bp, Homo Sapiens
gttcgatccccggcatctc

SEQ ID NO: 50362 - DNA, 20 bp, Homo Sapiens
gttcgatccccggcatctcc

SEQ ID NO: 50363 - DNA, 21 bp, Homo Sapiens
gttcgatccccggcatctcca

SEQ ID NO: 50364 - DNA, 22 bp, Homo Sapiens
gttcgatccccggcatctccac

SEQ ID NO: 50365 - DNA, 23 bp, Homo Sapiens
gttcgatccccggcatctccacc

SEQ ID NO: 50366 - DNA, 24 bp, Homo Sapiens
gttcgatccccggcatctccacca

SEQ ID NO: 50367 - DNA, 19 bp, Homo Sapiens
gttcgatccccgtacgggc

SEQ ID NO: 50368 - DNA, 22 bp, Homo Sapiens
gttcgatccccgtacgggccac

SEQ ID NO: 50369 - DNA, 23 bp, Homo Sapiens
gttcgatccccgtacgggccacc

SEQ ID NO: 50370 - DNA, 21 bp, Homo Sapiens
gttcgatccccgtactggcca

SEQ ID NO: 50371 - DNA, 17 bp, Homo Sapiens
gttcgatcccgggcgga

SEQ ID NO: 50372 - DNA, 21 bp, Homo Sapiens
gttcgatcccgggcggaaaca

SEQ ID NO: 50373 - DNA, 22 bp, Homo Sapiens
gttcgatcccgggcggaaacac

SEQ ID NO: 50374 - DNA, 23 bp, Homo Sapiens
gttcgatcccgggcggaaacacc

SEQ ID NO: 50375 - DNA, 22 bp, Homo Sapiens
gttcgatcccgggtttcggcac

SEQ ID NO: 50376 - DNA, 23 bp, Homo Sapiens
gttcgatcccgggtttcggcacc

SEQ ID NO: 50377 - DNA, 24 bp, Homo Sapiens
gttcgatcccgggtttcggcacca

SEQ ID NO: 50378 - DNA, 23 bp, Homo Sapiens
gttcgatcctcacacggggcacc

SEQ ID NO: 50379 - DNA, 24 bp, Homo Sapiens
gttcgatcctcacacggggcacca

SEQ ID NO: 50380 - DNA, 23 bp, Homo Sapiens
gttcgatcctcacctggagcacc

SEQ ID NO: 50381 - DNA, 16 bp, Homo Sapiens
gttcgattccccgacg

SEQ ID NO: 50382 - DNA, 17 bp, Homo Sapiens
gttcgattccccgacgg

SEQ ID NO: 50383 - DNA, 18 bp, Homo Sapiens
gttcgattccccgacggg

SEQ ID NO: 50384 - DNA, 19 bp, Homo Sapiens
gttcgattccccgacgggg

SEQ ID NO: 50385 - DNA, 20 bp, Homo Sapiens
gttcgattccccgacgggga

SEQ ID NO: 50386 - DNA, 21 bp, Homo Sapiens
gttcgattccccgacggggag

SEQ ID NO: 50387 - DNA, 22 bp, Homo Sapiens
gttcgattccccgacggggagc

SEQ ID NO: 50388 - DNA, 23 bp, Homo Sapiens
gttcgattccccgacggggagcc

SEQ ID NO: 50389 - DNA, 24 bp, Homo Sapiens
gttcgattccccgacggggagcca

SEQ ID NO: 50390 - DNA, 16 bp, Homo Sapiens
gttcgattcccggcca

SEQ ID NO: 50391 - DNA, 17 bp, Homo Sapiens
gttcgattcccggccaa

SEQ ID NO: 50392 - DNA, 18 bp, Homo Sapiens
gttcgattcccggccaac

SEQ ID NO: 50393 - DNA, 19 bp, Homo Sapiens
gttcgattcccggccaacg

SEQ ID NO: 50394 - DNA, 21 bp, Homo Sapiens
gttcgattcccggccaacgca

SEQ ID NO: 50395 - DNA, 22 bp, Homo Sapiens
gttcgattcccggccaacgcac

SEQ ID NO: 50396 - DNA, 23 bp, Homo Sapiens
gttcgattcccggccaacgcacc

SEQ ID NO: 50397 - DNA, 24 bp, Homo Sapiens
gttcgattcccggccaacgcacca

SEQ ID NO: 50398 - DNA, 18 bp, Homo Sapiens
gttcgattcccggccaat

SEQ ID NO: 50399 - DNA, 19 bp, Homo Sapiens
gttcgattcccggccaatg

SEQ ID NO: 50400 - DNA, 20 bp, Homo Sapiens
gttcgattcccggccaatgc

SEQ ID NO: 50401 - DNA, 21 bp, Homo Sapiens
gttcgattcccggccaatgca

SEQ ID NO: 50402 - DNA, 22 bp, Homo Sapiens
gttcgattcccggccaatgcac

SEQ ID NO: 50403 - DNA, 23 bp, Homo Sapiens
gttcgattcccggccaatgcacc

SEQ ID NO: 50404 - DNA, 24 bp, Homo Sapiens
gttcgattcccggccaatgcacca

SEQ ID NO: 50405 - DNA, 16 bp, Homo Sapiens
gttcgattcccggccc

SEQ ID NO: 50406 - DNA, 23 bp, Homo Sapiens
gttcgattcccggcccatgcacc

SEQ ID NO: 50407 - DNA, 24 bp, Homo Sapiens
gttcgattcccggcccatgcacca

SEQ ID NO: 50408 - DNA, 16 bp, Homo Sapiens
gttcgattcccgggcg

SEQ ID NO: 50409 - DNA, 17 bp, Homo Sapiens
gttcgattcccgggcgg

SEQ ID NO: 50410 - DNA, 18 bp, Homo Sapiens
gttcgattcccgggcggc

SEQ ID NO: 50411 - DNA, 19 bp, Homo Sapiens
gttcgattcccgggcggcg

SEQ ID NO: 50412 - DNA, 20 bp, Homo Sapiens
gttcgattcccgggcggcgc

SEQ ID NO: 50413 - DNA, 21 bp, Homo Sapiens
gttcgattcccgggcggcgca

SEQ ID NO: 50414 - DNA, 22 bp, Homo Sapiens
gttcgattcccgggcggcgcac

SEQ ID NO: 50415 - DNA, 23 bp, Homo Sapiens
gttcgattcccgggcggcgcacc

SEQ ID NO: 50416 - DNA, 24 bp, Homo Sapiens
gttcgattcccgggcggcgcacca

SEQ ID NO: 50417 - DNA, 16 bp, Homo Sapiens
gttcgattcccggtca

SEQ ID NO: 50418 - DNA, 17 bp, Homo Sapiens
gttcgattcccggtcag

SEQ ID NO: 50419 - DNA, 18 bp, Homo Sapiens
gttcgattcccggtcagg

SEQ ID NO: 50420 - DNA, 19 bp, Homo Sapiens
gttcgattcccggtcaggg

SEQ ID NO: 50421 - DNA, 20 bp, Homo Sapiens
gttcgattcccggtcaggga

SEQ ID NO: 50422 - DNA, 21 bp, Homo Sapiens
gttcgattcccggtcagggaa

SEQ ID NO: 50423 - DNA, 22 bp, Homo Sapiens
gttcgattcccggtcagggaac

SEQ ID NO: 50424 - DNA, 23 bp, Homo Sapiens
gttcgattcccggtcagggaacc

SEQ ID NO: 50425 - DNA, 24 bp, Homo Sapiens
gttcgattcccggtcagggaacca

SEQ ID NO: 50426 - DNA, 16 bp, Homo Sapiens
gttcgattccggctcg

SEQ ID NO: 50427 - DNA, 17 bp, Homo Sapiens
gttcgattccggctcga

SEQ ID NO: 50428 - DNA, 22 bp, Homo Sapiens
gttcgattccggctcgaaggac

SEQ ID NO: 50429 - DNA, 23 bp, Homo Sapiens
gttcgattccggctcgaaggacc

SEQ ID NO: 50430 - DNA, 24 bp, Homo Sapiens
gttcgattccggctcgaaggacca

SEQ ID NO: 50431 - DNA, 23 bp, Homo Sapiens
gttcgattccttccttttttgcc

SEQ ID NO: 50432 - DNA, 24 bp, Homo Sapiens
gttcgattccttccttttttgcca

SEQ ID NO: 50433 - DNA, 17 bp, Homo Sapiens
gttcgattctcatagtc

SEQ ID NO: 50434 - DNA, 18 bp, Homo Sapiens
gttcgattctcatagtcc

SEQ ID NO: 50435 - DNA, 19 bp, Homo Sapiens
gttcgattctcatagtcct

SEQ ID NO: 50436 - DNA, 21 bp, Homo Sapiens
gttcgattctcatagtcctag

SEQ ID NO: 50437 - DNA, 22 bp, Homo Sapiens
gttcgattctcatagtcctagc

SEQ ID NO: 50438 - DNA, 23 bp, Homo Sapiens
gttcgattctcatagtcctagcc

SEQ ID NO: 50439 - DNA, 24 bp, Homo Sapiens
gttcgattctcatagtcctagcca

SEQ ID NO: 50440 - DNA, 16 bp, Homo Sapiens
gttcttgtagttgaaa

SEQ ID NO: 50441 - DNA, 17 bp, Homo Sapiens
gttcttgtagttgaaat

SEQ ID NO: 50442 - DNA, 18 bp, Homo Sapiens
gttcttgtagttgaaata

SEQ ID NO: 50443 - DNA, 19 bp, Homo Sapiens
gttcttgtagttgaaatac

SEQ ID NO: 50444 - DNA, 20 bp, Homo Sapiens
gttcttgtagttgaaataca

SEQ ID NO: 50445 - DNA, 22 bp, Homo Sapiens
gttcttgtagttgaaatacaac

SEQ ID NO: 50446 - DNA, 23 bp, Homo Sapiens
gttcttgtagttgaaatacaacg

SEQ ID NO: 50447 - DNA, 24 bp, Homo Sapiens
gttcttgtagttgaaatacaacga

SEQ ID NO: 50448 - DNA, 26 bp, Homo Sapiens
gttcttgtagttgaaatacaacgatg

SEQ ID NO: 50449 - DNA, 27 bp, Homo Sapiens
gttcttgtagttgaaatacaacgatgg

SEQ ID NO: 50450 - DNA, 28 bp, Homo Sapiens
gttcttgtagttgaaatacaacgatggt

SEQ ID NO: 50451 - DNA, 29 bp, Homo Sapiens
gttcttgtagttgaaatacaacgatggtt

SEQ ID NO: 50452 - DNA, 32 bp, Homo Sapiens; identical to SEQ ID NO: 22222

SEQ ID NO: 50453 - DNA, 33 bp, Homo Sapiens; identical to SEQ ID NO: 22223

SEQ ID NO: 50454 - DNA, 35 bp, Homo Sapiens; identical to SEQ ID NO: 22225

SEQ ID NO: 50455 - DNA, 36 bp, Homo Sapiens; identical to SEQ ID NO: 22226

SEQ ID NO: 50456 - DNA, 38 bp, Homo Sapiens; identical to SEQ ID NO: 22228

SEQ ID NO: 50457 - DNA, 39 bp, Homo Sapiens; identical to SEQ ID NO: 22229

SEQ ID NO: 50458 - DNA, 40 bp, Homo Sapiens; identical to SEQ ID NO: 22230

SEQ ID NO: 50459 - DNA, 41 bp, Homo Sapiens; identical to SEQ ID NO: 22231

SEQ ID NO: 50460 - DNA, 42 bp, Homo Sapiens; identical to SEQ ID NO: 22232

SEQ ID NO: 50461 - DNA, 43 bp, Homo Sapiens; identical to SEQ ID NO: 22233

SEQ ID NO: 50462 - DNA, 44 bp, Homo Sapiens; identical to SEQ ID NO: 22234

SEQ ID NO: 50463 - DNA, 45 bp, Homo Sapiens; identical to SEQ ID NO: 22235

SEQ ID NO: 50464 - DNA, 46 bp, Homo Sapiens; identical to SEQ ID NO: 22236

SEQ ID NO: 50465 - DNA, 47 bp, Homo Sapiens; identical to SEQ ID NO: 22237

SEQ ID NO: 50466 - DNA, 20 bp, Homo Sapiens
gttgcaatacttaatttctg

SEQ ID NO: 50467 - DNA, 23 bp, Homo Sapiens
gttgcaatacttaatttctgcca

SEQ ID NO: 50468 - DNA, 22 bp, Homo Sapiens
gttgggagagcgttagactgaa

SEQ ID NO: 50469 - DNA, 30 bp, Homo Sapiens; identical to SEQ ID NO: 22329

SEQ ID NO: 50470 - DNA, 29 bp, Homo Sapiens
gttggtggtatagtggttagcatagctgc

SEQ ID NO: 50471 - DNA, 30 bp, Homo Sapiens; identical to SEQ ID NO: 22341

SEQ ID NO: 50472 - DNA, 31 bp, Homo Sapiens; identical to SEQ ID NO: 22342

SEQ ID NO: 50473 - DNA, 30 bp, Homo Sapiens; identical to SEQ ID NO: 22349

SEQ ID NO: 50474 - DNA, 27 bp, Homo Sapiens
gttggttatacccttcccgtactacca

SEQ ID NO: 50475 - DNA, 17 bp, Homo Sapiens
gttgtagtccgtgcgag

SEQ ID NO: 50476 - DNA, 18 bp, Homo Sapiens
gttgtagtccgtgcgaga

SEQ ID NO: 50477 - DNA, 19 bp, Homo Sapiens
gttgtagtccgtgcgagaa

SEQ ID NO: 50478 - DNA, 20 bp, Homo Sapiens
gttgtagtccgtgcgagaat

SEQ ID NO: 50479 - DNA, 21 bp, Homo Sapiens
gttgtagtccgtgcgagaata

SEQ ID NO: 50480 - DNA, 23 bp, Homo Sapiens
gttgtagtccgtgcgagaatacc

SEQ ID NO: 50481 - DNA, 24 bp, Homo Sapiens
gttgtagtccgtgcgagaatacca

SEQ ID NO: 50482 - DNA, 30 bp, Homo Sapiens; identical to SEQ ID NO: 22375

SEQ ID NO: 50483 - DNA, 28 bp, Homo Sapiens
gtttaaccaaaacatcagattgtgaatc

SEQ ID NO: 50484 - DNA, 41 bp, Homo Sapiens; identical to SEQ ID NO: 22410

SEQ ID NO: 50485 - DNA, 42 bp, Homo Sapiens; identical to SEQ ID NO: 22411

SEQ ID NO: 50486 - DNA, 16 bp, Homo Sapiens
gtttaagtcccattgg

SEQ ID NO: 50487 - DNA, 17 bp, Homo Sapiens
gtttaagtcccattggt

SEQ ID NO: 50488 - DNA, 16 bp, Homo Sapiens
gtttagacgggctcac

SEQ ID NO: 50489 - DNA, 17 bp, Homo Sapiens
gtttagacgggctcaca

SEQ ID NO: 50490 - DNA, 19 bp, Homo Sapiens
gtttagacgggctcacatc

SEQ ID NO: 50491 - DNA, 22 bp, Homo Sapiens
gtttagacgggctcacatcacc

SEQ ID NO: 50492 - DNA, 24 bp, Homo Sapiens
gtttagacgggctcacatcacccc

SEQ ID NO: 50493 - DNA, 25 bp, Homo Sapiens
gtttagacgggctcacatcacccca

SEQ ID NO: 50494 - DNA, 27 bp, Homo Sapiens
gtttagacgggctcacatcaccccata

SEQ ID NO: 50495 - DNA, 28 bp, Homo Sapiens
gtttagacgggctcacatcaccccataa

SEQ ID NO: 50496 - DNA, 29 bp, Homo Sapiens
gtttagacgggctcacatcaccccataaa

SEQ ID NO: 50497 - DNA, 33 bp, Homo Sapiens; identical to SEQ ID NO: 22437

SEQ ID NO: 50498 - DNA, 34 bp, Homo Sapiens; identical to SEQ ID NO: 22438

SEQ ID NO: 50499 - DNA, 22 bp, Homo Sapiens
gtttagtggtagaattctcgcc

SEQ ID NO: 50500 - DNA, 23 bp, Homo Sapiens
gtttagtggtagaattctcgcct

SEQ ID NO: 50501 - DNA, 17 bp, Homo Sapiens
gtttatgtagcttacct

SEQ ID NO: 50502 - DNA, 20 bp, Homo Sapiens
gtttatgtagcttacctcct

SEQ ID NO: 50503 - DNA, 30 bp, Homo Sapiens; identical to SEQ ID NO: 22453

SEQ ID NO: 50504 - DNA, 34 bp, Homo Sapiens; identical to SEQ ID NO: 22457

SEQ ID NO: 50505 - DNA, 16 bp, Homo Sapiens
gtttccccgcgcaggt

SEQ ID NO: 50506 - DNA, 37 bp, Homo Sapiens; identical to SEQ ID NO: 22466

SEQ ID NO: 50507 - DNA, 31 bp, Homo Sapiens; identical to SEQ ID NO: 22472

SEQ ID NO: 50508 - DNA, 32 bp, Homo Sapiens; identical to SEQ ID NO: 22473

SEQ ID NO: 50509 - DNA, 33 bp, Homo Sapiens; identical to SEQ ID NO: 22474

SEQ ID NO: 50510 - DNA, 34 bp, Homo Sapiens; identical to SEQ ID NO: 22475

SEQ ID NO: 50511 - DNA, 35 bp, Homo Sapiens; identical to SEQ ID NO: 22476

SEQ ID NO: 50512 - DNA, 16 bp, Homo Sapiens
gtttccgtagtgtagc

SEQ ID NO: 50513 - DNA, 17 bp, Homo Sapiens
gtttccgtagtgtagcg

SEQ ID NO: 50514 - DNA, 18 bp, Homo Sapiens
gtttccgtagtgtagcgg

SEQ ID NO: 50515 - DNA, 19 bp, Homo Sapiens
gtttccgtagtgtagcggt

SEQ ID NO: 50516 - DNA, 23 bp, Homo Sapiens
gtttccgtagtgtagcggttatc

SEQ ID NO: 50517 - DNA, 26 bp, Homo Sapiens
gtttccgtagtgtagcggttatcaca

SEQ ID NO: 50518 - DNA, 28 bp, Homo Sapiens
gtttccgtagtgtagcggttatcacatt

SEQ ID NO: 50519 - DNA, 29 bp, Homo Sapiens
gtttccgtagtgtagcggttatcacattc

SEQ ID NO: 50520 - DNA, 30 bp, Homo Sapiens; identical to SEQ ID NO: 22490

SEQ ID NO: 50521 - DNA, 31 bp, Homo Sapiens; identical to SEQ ID NO: 22491

SEQ ID NO: 50522 - DNA, 32 bp, Homo Sapiens; identical to SEQ ID NO: 22492

SEQ ID NO: 50523 - DNA, 33 bp, Homo Sapiens; identical to SEQ ID NO: 22493

SEQ ID NO: 50524 - DNA, 34 bp, Homo Sapiens; identical to SEQ ID NO: 22494

SEQ ID NO: 50525 - DNA, 35 bp, Homo Sapiens; identical to SEQ ID NO: 22495

SEQ ID NO: 50526 - DNA, 16 bp, Homo Sapiens
gtttccgtagtgtagt

SEQ ID NO: 50527 - DNA, 17 bp, Homo Sapiens
gtttccgtagtgtagtg

SEQ ID NO: 50528 - DNA, 18 bp, Homo Sapiens
gtttccgtagtgtagtgg

SEQ ID NO: 50529 - DNA, 19 bp, Homo Sapiens
gtttccgtagtgtagtggt

SEQ ID NO: 50530 - DNA, 21 bp, Homo Sapiens
gtttccgtagtgtagtggtca

SEQ ID NO: 50531 - DNA, 22 bp, Homo Sapiens
gtttccgtagtgtagtggtcat

SEQ ID NO: 50532 - DNA, 23 bp, Homo Sapiens
gtttccgtagtgtagtggtcatc

SEQ ID NO: 50533 - DNA, 24 bp, Homo Sapiens
gtttccgtagtgtagtggtcatca

SEQ ID NO: 50534 - DNA, 25 bp, Homo Sapiens
gtttccgtagtgtagtggtcatcac

SEQ ID NO: 50535 - DNA, 26 bp, Homo Sapiens
gtttccgtagtgtagtggtcatcacg

SEQ ID NO: 50536 - DNA, 29 bp, Homo Sapiens
gtttccgtagtgtagtggtcatcacgttc

SEQ ID NO: 50537 - DNA, 30 bp, Homo Sapiens; identical to SEQ ID NO: 22515

SEQ ID NO: 50538 - DNA, 31 bp, Homo Sapiens; identical to SEQ ID NO: 22516

SEQ ID NO: 50539 - DNA, 32 bp, Homo Sapiens; identical to SEQ ID NO: 22517

SEQ ID NO: 50540 - DNA, 33 bp, Homo Sapiens; identical to SEQ ID NO: 22518

SEQ ID NO: 50541 - DNA, 21 bp, Homo Sapiens
gtttccgtagtgtagtggtta

SEQ ID NO: 50542 - DNA, 22 bp, Homo Sapiens
gtttccgtagtgtagtggttat

SEQ ID NO: 50543 - DNA, 23 bp, Homo Sapiens
gtttccgtagtgtagtggttatc

SEQ ID NO: 50544 - DNA, 24 bp, Homo Sapiens
gtttccgtagtgtagtggttatca

SEQ ID NO: 50545 - DNA, 25 bp, Homo Sapiens
gtttccgtagtgtagtggttatcac

SEQ ID NO: 50546 - DNA, 26 bp, Homo Sapiens
gtttccgtagtgtagtggttatcacg

SEQ ID NO: 50547 - DNA, 28 bp, Homo Sapiens
gtttccgtagtgtagtggttatcacgtt

SEQ ID NO: 50548 - DNA, 29 bp, Homo Sapiens
gtttccgtagtgtagtggttatcacgttc

SEQ ID NO: 50549 - DNA, 30 bp, Homo Sapiens; identical to SEQ ID NO: 22533

SEQ ID NO: 50550 - DNA, 31 bp, Homo Sapiens; identical to SEQ ID NO: 22534

SEQ ID NO: 50551 - DNA, 32 bp, Homo Sapiens; identical to SEQ ID NO: 22535

SEQ ID NO: 50552 - DNA, 33 bp, Homo Sapiens; identical to SEQ ID NO: 22536

SEQ ID NO: 50553 - DNA, 36 bp, Homo Sapiens; identical to SEQ ID NO: 22539

SEQ ID NO: 50554 - DNA, 34 bp, Homo Sapiens; identical to SEQ ID NO: 22542

SEQ ID NO: 50555 - DNA, 35 bp, Homo Sapiens; identical to SEQ ID NO: 22543

SEQ ID NO: 50556 - DNA, 36 bp, Homo Sapiens; identical to SEQ ID NO: 22544

SEQ ID NO: 50557 - DNA, 37 bp, Homo Sapiens; identical to SEQ ID NO: 22545

SEQ ID NO: 50558 - DNA, 38 bp, Homo Sapiens; identical to SEQ ID NO: 22546

SEQ ID NO: 50559 - DNA, 39 bp, Homo Sapiens; identical to SEQ ID NO: 22547

SEQ ID NO: 50560 - DNA, 40 bp, Homo Sapiens; identical to SEQ ID NO: 22548

SEQ ID NO: 50561 - DNA, 41 bp, Homo Sapiens; identical to SEQ ID NO: 22549

SEQ ID NO: 50562 - DNA, 42 bp, Homo Sapiens; identical to SEQ ID NO: 22550

SEQ ID NO: 50563 - DNA, 43 bp, Homo Sapiens; identical to SEQ ID NO: 22551

SEQ ID NO: 50564 - DNA, 32 bp, Homo Sapiens; identical to SEQ ID NO: 22553

SEQ ID NO: 50565 - DNA, 33 bp, Homo Sapiens; identical to SEQ ID NO: 22554

SEQ ID NO: 50566 - DNA, 33 bp, Homo Sapiens; identical to SEQ ID NO: 22561

SEQ ID NO: 50567 - DNA, 30 bp, Homo Sapiens; identical to SEQ ID NO: 22572

SEQ ID NO: 50568 - DNA, 31 bp, Homo Sapiens; identical to SEQ ID NO: 22573

SEQ ID NO: 50569 - DNA, 17 bp, Homo Sapiens
gttttcacccaggcggc

SEQ ID NO: 50570 - DNA, 23 bp, Homo Sapiens
gttttcacccaggcggcccgggt

SEQ ID NO: 50571 - DNA, 42 bp, Homo Sapiens; identical to SEQ ID NO: 22581

SEQ ID NO: 50572 - DNA, 43 bp, Homo Sapiens; identical to SEQ ID NO: 22582

SEQ ID NO: 50573 - DNA, 45 bp, Homo Sapiens; identical to SEQ ID NO: 22584

SEQ ID NO: 50574 - DNA, 28 bp, Homo Sapiens
gttttgacaacattcaaaaaagagtacc

SEQ ID NO: 50575 - DNA, 17 bp, Homo Sapiens
gttttgcagtccttacc

SEQ ID NO: 50576 - DNA, 19 bp, Homo Sapiens
gtttttcatatcattggtc

SEQ ID NO: 50577 - DNA, 21 bp, Homo Sapiens
gtttttcatatcattggtcgt

SEQ ID NO: 50578 - DNA, 28 bp, Homo Sapiens
gtttttcatatcattggtcgtggttgta

SEQ ID NO: 50579 - DNA, 31 bp, Homo Sapiens; identical to SEQ ID NO: 22605

SEQ ID NO: 50580 - DNA, 32 bp, Homo Sapiens; identical to SEQ ID NO: 22606

SEQ ID NO: 50581 - DNA, 37 bp, Homo Sapiens; identical to SEQ ID NO: 22611

SEQ ID NO: 50582 - DNA, 40 bp, Homo Sapiens; identical to SEQ ID NO: 22614

SEQ ID NO: 50583 - DNA, 41 bp, Homo Sapiens; identical to SEQ ID NO: 22615

SEQ ID NO: 50584 - DNA, 42 bp, Homo Sapiens; identical to SEQ ID NO: 22616

SEQ ID NO: 50585 - DNA, 43 bp, Homo Sapiens; identical to SEQ ID NO: 22617

SEQ ID NO: 50586 - DNA, 45 bp, Homo Sapiens; identical to SEQ ID NO: 22619

SEQ ID NO: 50587 - DNA, 46 bp, Homo Sapiens; identical to SEQ ID NO: 22620

SEQ ID NO: 50588 - DNA, 29 bp, Homo Sapiens
taaaacttaaaactttacagtcagaggtt

SEQ ID NO: 50589 - DNA, 22 bp, Homo Sapiens
taaacaggagatcctgggttcg

SEQ ID NO: 50590 - DNA, 36 bp, Homo Sapiens; identical to SEQ ID NO: 22678

SEQ ID NO: 50591 - DNA, 37 bp, Homo Sapiens; identical to SEQ ID NO: 22679

SEQ ID NO: 50592 - DNA, 40 bp, Homo Sapiens; identical to SEQ ID NO: 22682

SEQ ID NO: 50593 - DNA, 41 bp, Homo Sapiens; identical to SEQ ID NO: 22683

SEQ ID NO: 50594 - DNA, 37 bp, Homo Sapiens; identical to SEQ ID NO: 22687

SEQ ID NO: 50595 - DNA, 38 bp, Homo Sapiens; identical to SEQ ID NO: 22688

SEQ ID NO: 50596 - DNA, 40 bp, Homo Sapiens; identical to SEQ ID NO: 22690

SEQ ID NO: 50597 - DNA, 41 bp, Homo Sapiens; identical to SEQ ID NO: 22691

SEQ ID NO: 50598 - DNA, 37 bp, Homo Sapiens
taaaccaggggtcgcgagttcaaatctcgctggggcc

SEQ ID NO: 50599 - DNA, 23 bp, Homo Sapiens
taaaccgaagatcacgggttcga

SEQ ID NO: 50600 - DNA, 19 bp, Homo Sapiens
taaaccgaagatcgcgggt

SEQ ID NO: 50601 - DNA, 22 bp, Homo Sapiens
taaaccgaagatcgcgggttcg

SEQ ID NO: 50602 - DNA, 23 bp, Homo Sapiens
taaaccgaagatcgcgggttcga

SEQ ID NO: 50603 - DNA, 38 bp, Homo Sapiens; identical to SEQ ID NO: 22727

SEQ ID NO: 50604 - DNA, 39 bp, Homo Sapiens; identical to SEQ ID NO: 22728

SEQ ID NO: 50605 - DNA, 40 bp, Homo Sapiens; identical to SEQ ID NO: 22729

SEQ ID NO: 50606 - DNA, 34 bp, Homo Sapiens; identical to SEQ ID NO: 22746

SEQ ID NO: 50607 - DNA, 35 bp, Homo Sapiens; identical to SEQ ID NO: 22747

SEQ ID NO: 50608 - DNA, 36 bp, Homo Sapiens; identical to SEQ ID NO: 22748

SEQ ID NO: 50609 - DNA, 32 bp, Homo Sapiens; identical to SEQ ID NO: 22763

SEQ ID NO: 50610 - DNA, 33 bp, Homo Sapiens; identical to SEQ ID NO: 22764

SEQ ID NO: 50611 - DNA, 18 bp, Homo Sapiens
taaagactttttctctga

SEQ ID NO: 50612 - DNA, 19 bp, Homo Sapiens
taaagactttttctctgac

SEQ ID NO: 50613 - DNA, 20 bp, Homo Sapiens
taaagactttttctctgacc

SEQ ID NO: 50614 - DNA, 21 bp, Homo Sapiens
taaagactttttctctgacca

SEQ ID NO: 50615 - DNA, 17 bp, Homo Sapiens
taaagattaagagaacc

SEQ ID NO: 50616 - DNA, 35 bp, Homo Sapiens; identical to SEQ ID NO: 22790

SEQ ID NO: 50617 - DNA, 36 bp, Homo Sapiens; identical to SEQ ID NO: 22791

SEQ ID NO: 50618 - DNA, 37 bp, Homo Sapiens; identical to SEQ ID NO: 22792

SEQ ID NO: 50619 - DNA, 38 bp, Homo Sapiens; identical to SEQ ID NO: 22793

SEQ ID NO: 50620 - DNA, 17 bp, Homo Sapiens
taaaggtccctggttcg

SEQ ID NO: 50621 - DNA, 34 bp, Homo Sapiens; identical to SEQ ID NO: 22802

SEQ ID NO: 50622 - DNA, 36 bp, Homo Sapiens
taaaggtccctggttcgatcccgggtttcggcacca

SEQ ID NO: 50623 - DNA, 16 bp, Homo Sapiens
taaataagctatcggg

SEQ ID NO: 50624 - DNA, 17 bp, Homo Sapiens
taaataagctatcgggc

SEQ ID NO: 50625 - DNA, 18 bp, Homo Sapiens
taaataagctatcgggcc

SEQ ID NO: 50626 - DNA, 20 bp, Homo Sapiens
taaataagctatcgggccca

SEQ ID NO: 50627 - DNA, 26 bp, Homo Sapiens
taaataataggagcttaaaccccctt

SEQ ID NO: 50628 - DNA, 27 bp, Homo Sapiens
taaataataggagcttaaaccccctta

SEQ ID NO: 50629 - DNA, 22 bp, Homo Sapiens
taaatacagaccaagagccttc

SEQ ID NO: 50630 - DNA, 23 bp, Homo Sapiens
taaatacagaccaagagccttca

SEQ ID NO: 50631 - DNA, 35 bp, Homo Sapiens; identical to SEQ ID NO: 22858

SEQ ID NO: 50632 - DNA, 41 bp, Homo Sapiens
taaatacagaccaagagccttcaaagccctcagtaagttgc

SEQ ID NO: 50633 - DNA, 38 bp, Homo Sapiens; identical to SEQ ID NO: 22885

SEQ ID NO: 50634 - DNA, 39 bp, Homo Sapiens; identical to SEQ ID NO: 22886

SEQ ID NO: 50635 - DNA, 24 bp, Homo Sapiens
taaccaaaacatcagattgtgaat

SEQ ID NO: 50636 - DNA, 25 bp, Homo Sapiens
taaccaaaacatcagattgtgaatc

SEQ ID NO: 50637 - DNA, 37 bp, Homo Sapiens; identical to SEQ ID NO: 22971

SEQ ID NO: 50638 - DNA, 20 bp, Homo Sapiens
taacccagaggtcgatggat

SEQ ID NO: 50639 - DNA, 21 bp, Homo Sapiens
taacccagaggtcgatggatc

SEQ ID NO: 50640 - DNA, 22 bp, Homo Sapiens
taacccagaggtcgatggatcg

SEQ ID NO: 50641 - DNA, 23 bp, Homo Sapiens
taacccagaggtcgatggatcga

SEQ ID NO: 50642 - DNA, 23 bp, Homo Sapiens
taaccgaaaggttggtggttcga

SEQ ID NO: 50643 - DNA, 25 bp, Homo Sapiens
taaccgaaaggttggtggttcgagc

SEQ ID NO: 50644 - DNA, 37 bp, Homo Sapiens; identical to SEQ ID NO: 22997

SEQ ID NO: 50645 - DNA, 40 bp, Homo Sapiens; identical to SEQ ID NO: 23000

SEQ ID NO: 50646 - DNA, 41 bp, Homo Sapiens; identical to SEQ ID NO: 23001

SEQ ID NO: 50647 - DNA, 19 bp, Homo Sapiens
taacgccaaggtcgcgggt

SEQ ID NO: 50648 - DNA, 21 bp, Homo Sapiens
taacgccaaggtcgcgggttc

SEQ ID NO: 50649 - DNA, 22 bp, Homo Sapiens
taacgccaaggtcgcgggttcg

SEQ ID NO: 50650 - DNA, 23 bp, Homo Sapiens
taacgccaaggtcgcgggttcga

SEQ ID NO: 50651 - DNA, 24 bp, Homo Sapiens
taacgccaaggtcgcgggttcgat

SEQ ID NO: 50652 - DNA, 36 bp, Homo Sapiens; identical to SEQ ID NO: 23027

SEQ ID NO: 50653 - DNA, 40 bp, Homo Sapiens; identical to SEQ ID NO: 23028

SEQ ID NO: 50654 - DNA, 41 bp, Homo Sapiens; identical to SEQ ID NO: 23029

SEQ ID NO: 50655 - DNA, 34 bp, Homo Sapiens; identical to SEQ ID NO: 23053

SEQ ID NO: 50656 - DNA, 32 bp, Homo Sapiens; identical to SEQ ID NO: 23068

SEQ ID NO: 50657 - DNA, 40 bp, Homo Sapiens; identical to SEQ ID NO: 23076

SEQ ID NO: 50658 - DNA, 16 bp, Homo Sapiens
taacttgaccgctctg

SEQ ID NO: 50659 - DNA, 17 bp, Homo Sapiens
taacttgaccgctctga

SEQ ID NO: 50660 - DNA, 18 bp, Homo Sapiens
taacttgaccgctctgac

SEQ ID NO: 50661 - DNA, 19 bp, Homo Sapiens
taacttgaccgctctgacc

SEQ ID NO: 50662 - DNA, 20 bp, Homo Sapiens
taacttgaccgctctgacca

SEQ ID NO: 50663 - DNA, 29 bp, Homo Sapiens
taagagaaccaacacctctttacagtgac

SEQ ID NO: 50664 - DNA, 30 bp, Homo Sapiens; identical to SEQ ID NO: 23119

SEQ ID NO: 50665 - DNA, 31 bp, Homo Sapiens; identical to SEQ ID NO: 23120

SEQ ID NO: 50666 - DNA, 17 bp, Homo Sapiens
taagccagggattgtgg

SEQ ID NO: 50667 - DNA, 21 bp, Homo Sapiens
taagccagggattgtgggttc

SEQ ID NO: 50668 - DNA, 22 bp, Homo Sapiens
taagccagggattgtgggttcg

SEQ ID NO: 50669 - DNA, 31 bp, Homo Sapiens; identical to SEQ ID NO: 23176

SEQ ID NO: 50670 - DNA, 40 bp, Homo Sapiens; identical to SEQ ID NO: 23179

SEQ ID NO: 50671 - DNA, 41 bp, Homo Sapiens; identical to SEQ ID NO: 23180

SEQ ID NO: 50672 - DNA, 20 bp, Homo Sapiens
taagctatcgggcccatacc

SEQ ID NO: 50673 - DNA, 24 bp, Homo Sapiens
taagctatcgggcccataccccga

SEQ ID NO: 50674 - DNA, 25 bp, Homo Sapiens
taagctatcgggcccataccccgaa

SEQ ID NO: 50675 - DNA, 26 bp, Homo Sapiens
taagctatcgggcccataccccgaaa

SEQ ID NO: 50676 - DNA, 28 bp, Homo Sapiens
taaggtcagctaaataagctatcgggcc

SEQ ID NO: 50677 - DNA, 29 bp, Homo Sapiens
taaggtcagctaaataagctatcgggccc

SEQ ID NO: 50678 - DNA, 31 bp, Homo Sapiens; identical to SEQ ID NO: 23226

SEQ ID NO: 50679 - DNA, 16 bp, Homo Sapiens
taagtgtttgtgggtt

SEQ ID NO: 50680 - DNA, 35 bp, Homo Sapiens; identical to SEQ ID NO: 23255

SEQ ID NO: 50681 - DNA, 30 bp, Homo Sapiens; identical to SEQ ID NO: 23269

SEQ ID NO: 50682 - DNA, 34 bp, Homo Sapiens; identical to SEQ ID NO: 23273

SEQ ID NO: 50683 - DNA, 42 bp, Homo Sapiens; identical to SEQ ID NO: 23280

SEQ ID NO: 50684 - DNA, 17 bp, Homo Sapiens
taataggagcttaaacc

SEQ ID NO: 50685 - DNA, 18 bp, Homo Sapiens
taataggagcttaaaccc

SEQ ID NO: 50686 - DNA, 32 bp, Homo Sapiens; identical to SEQ ID NO: 23303

SEQ ID NO: 50687 - DNA, 19 bp, Homo Sapiens
taatctgaaggtcctgagt

SEQ ID NO: 50688 - DNA, 37 bp, Homo Sapiens; identical to SEQ ID NO: 23347

SEQ ID NO: 50689 - DNA, 39 bp, Homo Sapiens; identical to SEQ ID NO: 23349

SEQ ID NO: 50690 - DNA, 40 bp, Homo Sapiens; identical to SEQ ID NO: 23350

SEQ ID NO: 50691 - DNA, 41 bp, Homo Sapiens; identical to SEQ ID NO: 23351

SEQ ID NO: 50692 - DNA, 37 bp, Homo Sapiens; identical to SEQ ID NO: 23362

SEQ ID NO: 50693 - DNA, 40 bp, Homo Sapiens; identical to SEQ ID NO: 23365

SEQ ID NO: 50694 - DNA, 41 bp, Homo Sapiens; identical to SEQ ID NO: 23366

SEQ ID NO: 50695 - DNA, 37 bp, Homo Sapiens; identical to SEQ ID NO: 40294

SEQ ID NO: 50696 - DNA, 40 bp, Homo Sapiens; identical to SEQ ID NO: 23371

SEQ ID NO: 50697 - DNA, 41 bp, Homo Sapiens; identical to SEQ ID NO: 23372

SEQ ID NO: 50698 - DNA, 21 bp, Homo Sapiens
taatgccgaggttgtgagttc

SEQ ID NO: 50699 - DNA, 37 bp, Homo Sapiens
taatgccgaggttgtgagttcgagcctcacctggagc

SEQ ID NO: 50700 - DNA, 16 bp, Homo Sapiens
taatggataaggcact

SEQ ID NO: 50701 - DNA, 17 bp, Homo Sapiens
taatggataaggcactg

SEQ ID NO: 50702 - DNA, 19 bp, Homo Sapiens
taatggataaggcactggc

SEQ ID NO: 50703 - DNA, 16 bp, Homo Sapiens
taatggataaggcatc

SEQ ID NO: 50704 - DNA, 17 bp, Homo Sapiens
taatggataaggcatca

SEQ ID NO: 50705 - DNA, 21 bp, Homo Sapiens
taatggataaggcatcagcct

SEQ ID NO: 50706 - DNA, 30 bp, Homo Sapiens; identical to SEQ ID NO: 23400

SEQ ID NO: 50707 - DNA, 38 bp, Homo Sapiens; identical to SEQ ID NO: 40307

SEQ ID NO: 50708 - DNA, 16 bp, Homo Sapiens
taatggataaggcatt

SEQ ID NO: 50709 - DNA, 17 bp, Homo Sapiens
taatggataaggcattg

SEQ ID NO: 50710 - DNA, 19 bp, Homo Sapiens
taatggataaggcattggc

SEQ ID NO: 50711 - DNA, 20 bp, Homo Sapiens
taatggataaggcattggcc

SEQ ID NO: 50712 - DNA, 16 bp, Homo Sapiens
taatggataaggcgtc

SEQ ID NO: 50713 - DNA, 19 bp, Homo Sapiens
taatggataaggcgtctga

SEQ ID NO: 50714 - DNA, 23 bp, Homo Sapiens
taatggataaggcgtctgattcc

SEQ ID NO: 50715 - DNA, 31 bp, Homo Sapiens; identical to SEQ ID NO: 23440

SEQ ID NO: 50716 - DNA, 32 bp, Homo Sapiens; identical to SEQ ID NO: 23441

SEQ ID NO: 50717 - DNA, 17 bp, Homo Sapiens
taatggttagcactctg

SEQ ID NO: 50718 - DNA, 18 bp, Homo Sapiens
taatggttagcactctgg

SEQ ID NO: 50719 - DNA, 19 bp, Homo Sapiens
taatggttagcactctgga

SEQ ID NO: 50720 - DNA, 21 bp, Homo Sapiens
taatggttagcactctggact

SEQ ID NO: 50721 - DNA, 22 bp, Homo Sapiens
taatggttagcactctggactc

SEQ ID NO: 50722 - DNA, 25 bp, Homo Sapiens
taatggttagcactctggactctga

SEQ ID NO: 50723 - DNA, 26 bp, Homo Sapiens
taatggttagcactctggactctgaa

SEQ ID NO: 50724 - DNA, 28 bp, Homo Sapiens
taatggttagcactctggactctgaatc

SEQ ID NO: 50725 - DNA, 29 bp, Homo Sapiens
taatggttagcactctggactctgaatcc

SEQ ID NO: 50726 - DNA, 32 bp, Homo Sapiens; identical to SEQ ID NO: 40333

SEQ ID NO: 50727 - DNA, 33 bp, Homo Sapiens; identical to SEQ ID NO: 23457

SEQ ID NO: 50728 - DNA, 41 bp, Homo Sapiens; identical to SEQ ID NO: 23459

SEQ ID NO: 50729 - DNA, 28 bp, Homo Sapiens
taatggttagcactctggactttgaatc

SEQ ID NO: 50730 - DNA, 29 bp, Homo Sapiens
taatggttagcactctggactttgaatcc

SEQ ID NO: 50731 - DNA, 19 bp, Homo Sapiens
taattcaaaggttccgggt

SEQ ID NO: 50732 - DNA, 21 bp, Homo Sapiens
taattcaaaggttccgggttc

SEQ ID NO: 50733 - DNA, 40 bp, Homo Sapiens; identical to SEQ ID NO: 23474

SEQ ID NO: 50734 - DNA, 40 bp, Homo Sapiens; identical to SEQ ID NO: 23490

SEQ ID NO: 50735 - DNA, 42 bp, Homo Sapiens; identical to SEQ ID NO: 23499

SEQ ID NO: 50736 - DNA, 25 bp, Homo Sapiens
tacactgaaaatgtttagacgggct

SEQ ID NO: 50737 - DNA, 34 bp, Homo Sapiens; identical to SEQ ID NO: 23531

SEQ ID NO: 50738 - DNA, 37 bp, Homo Sapiens; identical to SEQ ID NO: 23534

SEQ ID NO: 50739 - DNA, 38 bp, Homo Sapiens; identical to SEQ ID NO: 23535

SEQ ID NO: 50740 - DNA, 39 bp, Homo Sapiens; identical to SEQ ID NO: 23536

SEQ ID NO: 50741 - DNA, 40 bp, Homo Sapiens; identical to SEQ ID NO: 23537

SEQ ID NO: 50742 - DNA, 41 bp, Homo Sapiens; identical to SEQ ID NO: 23538

SEQ ID NO: 50743 - DNA, 27 bp, Homo Sapiens
tacagaccaagagccttcaaagccctc

SEQ ID NO: 50744 - DNA, 39 bp, Homo Sapiens; identical to SEQ ID NO: 23572

SEQ ID NO: 50745 - DNA, 25 bp, Homo Sapiens
tacctcctcaaagcaatacactgaa

SEQ ID NO: 50746 - DNA, 18 bp, Homo Sapiens
tactctgcgttgtggccg

SEQ ID NO: 50747 - DNA, 20 bp, Homo Sapiens
tactctgcgttgtggccgca

SEQ ID NO: 50748 - DNA, 16 bp, Homo Sapiens
tacttaatttctgcca

SEQ ID NO: 50749 - DNA, 28 bp, Homo Sapiens
tagaatcttagctttgggtgctaatggt

SEQ ID NO: 50750 - DNA, 41 bp, Homo Sapiens; identical to SEQ ID NO: 23637

SEQ ID NO: 50751 - DNA, 16 bp, Homo Sapiens
tagaattctcgcctgc

SEQ ID NO: 50752 - DNA, 17 bp, Homo Sapiens
tagaattctcgcctgcc

SEQ ID NO: 50753 - DNA, 18 bp, Homo Sapiens
tagaattctcgcctgcca

SEQ ID NO: 50754 - DNA, 19 bp, Homo Sapiens
tagaattctcgcctgccac

SEQ ID NO: 50755 - DNA, 20 bp, Homo Sapiens
tagaattctcgcctgccacg

SEQ ID NO: 50756 - DNA, 21 bp, Homo Sapiens
tagaattctcgcctgccacgc

SEQ ID NO: 50757 - DNA, 22 bp, Homo Sapiens
tagaattctcgcctgccacgcg

SEQ ID NO: 50758 - DNA, 23 bp, Homo Sapiens
tagaattctcgcctgccacgcgg

SEQ ID NO: 50759 - DNA, 25 bp, Homo Sapiens
tagaattctcgcctgccacgcggga

SEQ ID NO: 50760 - DNA, 29 bp, Homo Sapiens
tagaattctcgcctgccacgcgggaggcc

SEQ ID NO: 50761 - DNA, 30 bp, Homo Sapiens; identical to SEQ ID NO: 23652

SEQ ID NO: 50762 - DNA, 32 bp, Homo Sapiens; identical to SEQ ID NO: 23654

SEQ ID NO: 50763 - DNA, 33 bp, Homo Sapiens; identical to SEQ ID NO: 23655

SEQ ID NO: 50764 - DNA, 34 bp, Homo Sapiens; identical to SEQ ID NO: 23656

SEQ ID NO: 50765 - DNA, 19 bp, Homo Sapiens
tagacgggctcacatcacc

SEQ ID NO: 50766 - DNA, 30 bp, Homo Sapiens; identical to SEQ ID NO: 23674

SEQ ID NO: 50767 - DNA, 31 bp, Homo Sapiens; identical to SEQ ID NO: 23675

SEQ ID NO: 50768 - DNA, 22 bp, Homo Sapiens
tagagcatgagactcttaatct

SEQ ID NO: 50769 - DNA, 30 bp, Homo Sapiens; identical to SEQ ID NO: 23689

SEQ ID NO: 50770 - DNA, 32 bp, Homo Sapiens; identical to SEQ ID NO: 23691

SEQ ID NO: 50771 - DNA, 33 bp, Homo Sapiens; identical to SEQ ID NO: 23692

SEQ ID NO: 50772 - DNA, 34 bp, Homo Sapiens; identical to SEQ ID NO: 23693

SEQ ID NO: 50773 - DNA, 35 bp, Homo Sapiens; identical to SEQ ID NO: 23694

SEQ ID NO: 50774 - DNA, 36 bp, Homo Sapiens; identical to SEQ ID NO: 23695

SEQ ID NO: 50775 - DNA, 37 bp, Homo Sapiens; identical to SEQ ID NO: 23696

SEQ ID NO: 50776 - DNA, 44 bp, Homo Sapiens; identical to SEQ ID NO: 23699

SEQ ID NO: 50777 - DNA, 21 bp, Homo Sapiens
tagagcatgggactcttaatc

SEQ ID NO: 50778 - DNA, 22 bp, Homo Sapiens
tagagcatgggactcttaatcc

SEQ ID NO: 50779 - DNA, 23 bp, Homo Sapiens
tagagcatgggactcttaatccc

SEQ ID NO: 50780 - DNA, 30 bp, Homo Sapiens; identical to SEQ ID NO: 23708

SEQ ID NO: 50781 - DNA, 31 bp, Homo Sapiens; identical to SEQ ID NO: 23709

SEQ ID NO: 50782 - DNA, 32 bp, Homo Sapiens; identical to SEQ ID NO: 23710

SEQ ID NO: 50783 - DNA, 33 bp, Homo Sapiens; identical to SEQ ID NO: 23711

SEQ ID NO: 50784 - DNA, 34 bp, Homo Sapiens; identical to SEQ ID NO: 23712

SEQ ID NO: 50785 - DNA, 35 bp, Homo Sapiens; identical to SEQ ID NO: 23713

SEQ ID NO: 50786 - DNA, 36 bp, Homo Sapiens; identical to SEQ ID NO: 23714

SEQ ID NO: 50787 - DNA, 38 bp, Homo Sapiens; identical to SEQ ID NO: 23715

SEQ ID NO: 50788 - DNA, 42 bp, Homo Sapiens; identical to SEQ ID NO: 23716

SEQ ID NO: 50789 - DNA, 44 bp, Homo Sapiens; identical to SEQ ID NO: 23717

SEQ ID NO: 50790 - DNA, 44 bp, Homo Sapiens
tagagcatgggactcttaatcccagggtcgtgggtttgagcccc

SEQ ID NO: 50791 - DNA, 16 bp, Homo Sapiens
tagagcatttgactgc

SEQ ID NO: 50792 - DNA, 36 bp, Homo Sapiens; identical to SEQ ID NO: 23764

SEQ ID NO: 50793 - DNA, 18 bp, Homo Sapiens
tagcactctggactctga

SEQ ID NO: 50794 - DNA, 19 bp, Homo Sapiens
tagcactctggactctgaa

SEQ ID NO: 50795 - DNA, 20 bp, Homo Sapiens
tagcactctggactctgaat

SEQ ID NO: 50796 - DNA, 21 bp, Homo Sapiens
tagcactctggactctgaatc

SEQ ID NO: 50797 - DNA, 22 bp, Homo Sapiens
tagcactctggactctgaatcc

SEQ ID NO: 50798 - DNA, 23 bp, Homo Sapiens
tagcactctggactctgaatcca

SEQ ID NO: 50799 - DNA, 24 bp, Homo Sapiens
tagcactctggactctgaatccag

SEQ ID NO: 50800 - DNA, 25 bp, Homo Sapiens
tagcactctggactctgaatccagc

SEQ ID NO: 50801 - DNA, 26 bp, Homo Sapiens
tagcactctggactctgaatccagcg

SEQ ID NO: 50802 - DNA, 33 bp, Homo Sapiens; identical to SEQ ID NO: 23787

SEQ ID NO: 50803 - DNA, 34 bp, Homo Sapiens; identical to SEQ ID NO: 23788

SEQ ID NO: 50804 - DNA, 36 bp, Homo Sapiens; identical to SEQ ID NO: 23790

SEQ ID NO: 50805 - DNA, 37 bp, Homo Sapiens; identical to SEQ ID NO: 23791

SEQ ID NO: 50806 - DNA, 45 bp, Homo Sapiens; identical to SEQ ID NO: 23794

SEQ ID NO: 50807 - DNA, 21 bp, Homo Sapiens
tagcactctggactttgaatc

SEQ ID NO: 50808 - DNA, 22 bp, Homo Sapiens
tagcactctggactttgaatcc

SEQ ID NO: 50809 - DNA, 36 bp, Homo Sapiens; identical to SEQ ID NO: 23823

SEQ ID NO: 50810 - DNA, 16 bp, Homo Sapiens
tagcggttaggattcc

SEQ ID NO: 50811 - DNA, 20 bp, Homo Sapiens
tagcggttaggattcctggt

SEQ ID NO: 50812 - DNA, 21 bp, Homo Sapiens
tagcggttaggattcctggtt

SEQ ID NO: 50813 - DNA, 22 bp, Homo Sapiens
tagcggttaggattcctggttt

SEQ ID NO: 50814 - DNA, 23 bp, Homo Sapiens
tagcggttaggattcctggtttt

SEQ ID NO: 50815 - DNA, 30 bp, Homo Sapiens; identical to SEQ ID NO: 23856

SEQ ID NO: 50816 - DNA, 19 bp, Homo Sapiens
tagcgtggccgagcggtct

SEQ ID NO: 50817 - DNA, 20 bp, Homo Sapiens
tagcgtggccgagcggtcta

SEQ ID NO: 50818 - DNA, 22 bp, Homo Sapiens
tagcgtggccgagcggtctaag

SEQ ID NO: 50819 - DNA, 24 bp, Homo Sapiens
tagcgtggccgagcggtctaaggc

SEQ ID NO: 50820 - DNA, 24 bp, Homo Sapiens
tagcgtggccgagtggtctaaggc

SEQ ID NO: 50821 - DNA, 26 bp, Homo Sapiens
tagctcaggggttagagcactggtct

SEQ ID NO: 50822 - DNA, 16 bp, Homo Sapiens
tagctcagtcggtaga

SEQ ID NO: 50823 - DNA, 17 bp, Homo Sapiens
tagctcagtcggtagag

SEQ ID NO: 50824 - DNA, 25 bp, Homo Sapiens
tagctcagtcggtagagcatcagac

SEQ ID NO: 50825 - DNA, 26 bp, Homo Sapiens
tagctcagtcggtagagcatcagact

SEQ ID NO: 50826 - DNA, 26 bp, Homo Sapiens
tagctcagtcggtagagcatgagact

SEQ ID NO: 50827 - DNA, 28 bp, Homo Sapiens
tagctcagtcggtagagcatgagactct

SEQ ID NO: 50828 - DNA, 23 bp, Homo Sapiens
tagctcagtcggtagagcatggg

SEQ ID NO: 50829 - DNA, 25 bp, Homo Sapiens
tagctcagtcggtagagcatgggac

SEQ ID NO: 50830 - DNA, 26 bp, Homo Sapiens
tagctcagtcggtagagcatgggact

SEQ ID NO: 50831 - DNA, 27 bp, Homo Sapiens
tagctcagtcggtagagcatgggactc

SEQ ID NO: 50832 - DNA, 28 bp, Homo Sapiens
tagctcagtcggtagagcatgggactct

SEQ ID NO: 50833 - DNA, 34 bp, Homo Sapiens; identical to SEQ ID NO: 23927

SEQ ID NO: 50834 - DNA, 28 bp, Homo Sapiens
tagctgttaactaagtgtttgtgggttt

SEQ ID NO: 50835 - DNA, 43 bp, Homo Sapiens; identical to SEQ ID NO: 23962

SEQ ID NO: 50836 - DNA, 44 bp, Homo Sapiens; identical to SEQ ID NO: 23990

SEQ ID NO: 50837 - DNA, 45 bp, Homo Sapiens; identical to SEQ ID NO: 23991

SEQ ID NO: 50838 - DNA, 25 bp, Homo Sapiens
taggagatttcaacttaacttgacc

SEQ ID NO: 50839 - DNA, 28 bp, Homo Sapiens
taggagatttcaacttaacttgaccgct

SEQ ID NO: 50840 - DNA, 30 bp, Homo Sapiens; identical to SEQ ID NO: 24007

SEQ ID NO: 50841 - DNA, 31 bp, Homo Sapiens; identical to SEQ ID NO: 24008

SEQ ID NO: 50842 - DNA, 32 bp, Homo Sapiens; identical to SEQ ID NO: 24009

SEQ ID NO: 50843 - DNA, 33 bp, Homo Sapiens; identical to SEQ ID NO: 24010

SEQ ID NO: 50844 - DNA, 34 bp, Homo Sapiens; identical to SEQ ID NO: 24011

SEQ ID NO: 50845 - DNA, 35 bp, Homo Sapiens; identical to SEQ ID NO: 24012

SEQ ID NO: 50846 - DNA, 17 bp, Homo Sapiens
taggagcttaaaccccc

SEQ ID NO: 50847 - DNA, 28 bp, Homo Sapiens
taggagcttaaacccccttatttctacc

SEQ ID NO: 50848 - DNA, 29 bp, Homo Sapiens
taggagcttaaacccccttatttctacca

SEQ ID NO: 50849 - DNA, 16 bp, Homo Sapiens
taggatggggtgtgat

SEQ ID NO: 50850 - DNA, 17 bp, Homo Sapiens
taggatggggtgtgata

SEQ ID NO: 50851 - DNA, 19 bp, Homo Sapiens
taggatggggtgtgatagg

SEQ ID NO: 50852 - DNA, 20 bp, Homo Sapiens
taggatggggtgtgataggt

SEQ ID NO: 50853 - DNA, 21 bp, Homo Sapiens
taggatggggtgtgataggtg

SEQ ID NO: 50854 - DNA, 22 bp, Homo Sapiens
taggatggggtgtgataggtgg

SEQ ID NO: 50855 - DNA, 23 bp, Homo Sapiens
taggatggggtgtgataggtggc

SEQ ID NO: 50856 - DNA, 24 bp, Homo Sapiens
taggatggggtgtgataggtggca

SEQ ID NO: 50857 - DNA, 25 bp, Homo Sapiens
taggatggggtgtgataggtggcac

SEQ ID NO: 50858 - DNA, 26 bp, Homo Sapiens
taggatggggtgtgataggtggcacg

SEQ ID NO: 50859 - DNA, 27 bp, Homo Sapiens
taggatggggtgtgataggtggcacgg

SEQ ID NO: 50860 - DNA, 28 bp, Homo Sapiens
taggatggggtgtgataggtggcacgga

SEQ ID NO: 50861 - DNA, 29 bp, Homo Sapiens
taggatggggtgtgataggtggcacggag

SEQ ID NO: 50862 - DNA, 30 bp, Homo Sapiens; identical to SEQ ID NO: 24039

SEQ ID NO: 50863 - DNA, 31 bp, Homo Sapiens; identical to SEQ ID NO: 24040

SEQ ID NO: 50864 - DNA, 32 bp, Homo Sapiens; identical to SEQ ID NO: 24041

SEQ ID NO: 50865 - DNA, 33 bp, Homo Sapiens; identical to SEQ ID NO: 24042

SEQ ID NO: 50866 - DNA, 34 bp, Homo Sapiens; identical to SEQ ID NO: 24043

SEQ ID NO: 50867 - DNA, 35 bp, Homo Sapiens; identical to SEQ ID NO: 24044

SEQ ID NO: 50868 - DNA, 36 bp, Homo Sapiens; identical to SEQ ID NO: 24045

SEQ ID NO: 50869 - DNA, 37 bp, Homo Sapiens; identical to SEQ ID NO: 24046

SEQ ID NO: 50870 - DNA, 38 bp, Homo Sapiens; identical to SEQ ID NO: 24047

SEQ ID NO: 50871 - DNA, 41 bp, Homo Sapiens; identical to SEQ ID NO: 24050

SEQ ID NO: 50872 - DNA, 42 bp, Homo Sapiens; identical to SEQ ID NO: 24051

SEQ ID NO: 50873 - DNA, 43 bp, Homo Sapiens; identical to SEQ ID NO: 24052

SEQ ID NO: 50874 - DNA, 44 bp, Homo Sapiens; identical to SEQ ID NO: 24053

SEQ ID NO: 50875 - DNA, 24 bp, Homo Sapiens
taggattcctggttttcacccagg

SEQ ID NO: 50876 - DNA, 29 bp, Homo Sapiens
taggattcctggttttcacccaggcggcc

SEQ ID NO: 50877 - DNA, 47 bp, Homo Sapiens; identical to SEQ ID NO: 24063

SEQ ID NO: 50878 - DNA, 26 bp, Homo Sapiens
taggattcctggttttcacccaggtg

SEQ ID NO: 50879 - DNA, 47 bp, Homo Sapiens; identical to SEQ ID NO: 40513

SEQ ID NO: 50880 - DNA, 16 bp, Homo Sapiens
taggattcggcgctct

SEQ ID NO: 50881 - DNA, 17 bp, Homo Sapiens
taggattcggcgctctc

SEQ ID NO: 50882 - DNA, 20 bp, Homo Sapiens
taggattcggcgctctcacc

SEQ ID NO: 50883 - DNA, 21 bp, Homo Sapiens
taggattcggcgctctcaccg

SEQ ID NO: 50884 - DNA, 23 bp, Homo Sapiens
taggattcggcgctctcaccgcc

SEQ ID NO: 50885 - DNA, 29 bp, Homo Sapiens
taggattcggcgctctcaccgccgcggcc

SEQ ID NO: 50886 - DNA, 36 bp, Homo Sapiens; identical to SEQ ID NO: 24084

SEQ ID NO: 50887 - DNA, 16 bp, Homo Sapiens
taggggtatgattctc

SEQ ID NO: 50888 - DNA, 18 bp, Homo Sapiens
taggggtatgattctcgc

SEQ ID NO: 50889 - DNA, 19 bp, Homo Sapiens
taggggtatgattctcgct

SEQ ID NO: 50890 - DNA, 20 bp, Homo Sapiens
taggggtatgattctcgctt

SEQ ID NO: 50891 - DNA, 18 bp, Homo Sapiens
taggggtatgattctcgg

SEQ ID NO: 50892 - DNA, 19 bp, Homo Sapiens
taggggtatgattctcggt

SEQ ID NO: 50893 - DNA, 18 bp, Homo Sapiens
taggtagcgcatcagtct

SEQ ID NO: 50894 - DNA, 32 bp, Homo Sapiens; identical to SEQ ID NO: 24135

SEQ ID NO: 50895 - DNA, 33 bp, Homo Sapiens; identical to SEQ ID NO: 24136

SEQ ID NO: 50896 - DNA, 33 bp, Homo Sapiens; identical to SEQ ID NO: 24144

SEQ ID NO: 50897 - DNA, 34 bp, Homo Sapiens
taggtcgctggttcgattccggctcgaaggacca

SEQ ID NO: 50898 - DNA, 16 bp, Homo Sapiens
taggtggcacggagaa

SEQ ID NO: 50899 - DNA, 20 bp, Homo Sapiens
taggtggcacggagaatttt

SEQ ID NO: 50900 - DNA, 24 bp, Homo Sapiens
taggttcgactcctggctggctcg

SEQ ID NO: 50901 - DNA, 26 bp, Homo Sapiens
taggttcgactcctggctggctcgcc

SEQ ID NO: 50902 - DNA, 27 bp, Homo Sapiens
taggttcgactcctggctggctcgcca

SEQ ID NO: 50903 - DNA, 39 bp, Homo Sapiens
tagtaccgttaacttccaattaactagttttgacaacat

SEQ ID NO: 50904 - DNA, 17 bp, Homo Sapiens
tagtccgtgcgagaata

SEQ ID NO: 50905 - DNA, 19 bp, Homo Sapiens
tagtccgtgcgagaatacc

SEQ ID NO: 50906 - DNA, 20 bp, Homo Sapiens
tagtccgtgcgagaatacca

SEQ ID NO: 50907 - DNA, 22 bp, Homo Sapiens
tagtcgtggccgagtggttaag

SEQ ID NO: 50908 - DNA, 18 bp, Homo Sapiens
tagtggtagaattctcgc

SEQ ID NO: 50909 - DNA, 19 bp, Homo Sapiens
tagtggtagaattctcgcc

SEQ ID NO: 50910 - DNA, 20 bp, Homo Sapiens
tagtggtagaattctcgcct

SEQ ID NO: 50911 - DNA, 17 bp, Homo Sapiens
tagtggtatcatgcaag

SEQ ID NO: 50912 - DNA, 18 bp, Homo Sapiens
tagtggtatcatgcaaga

SEQ ID NO: 50913 - DNA, 19 bp, Homo Sapiens
tagtggtatcatgcaagat

SEQ ID NO: 50914 - DNA, 20 bp, Homo Sapiens
tagtggtatcatgcaagatt

SEQ ID NO: 50915 - DNA, 19 bp, Homo Sapiens
tagtggtatgattctcgct

SEQ ID NO: 50916 - DNA, 20 bp, Homo Sapiens
tagtggtatgattctcgctt

SEQ ID NO: 50917 - DNA, 21 bp, Homo Sapiens
tagtggtcatcacgttcgcct

SEQ ID NO: 50918 - DNA, 19 bp, Homo Sapiens
tagtggtgagtatccccgc

SEQ ID NO: 50919 - DNA, 21 bp, Homo Sapiens
tagtggtgagtatccccgcct

SEQ ID NO: 50920 - DNA, 24 bp, Homo Sapiens
tagtggtgagtatccccgcctgtc

SEQ ID NO: 50921 - DNA, 26 bp, Homo Sapiens
tagtggtgagtatccccgcctgtcac

SEQ ID NO: 50922 - DNA, 28 bp, Homo Sapiens
tagtggtgagtatccccgcctgtcacgc

SEQ ID NO: 50923 - DNA, 34 bp, Homo Sapiens
tagtggtgagtatccccgcctgtcacgcgggaga

SEQ ID NO: 50924 - DNA, 16 bp, Homo Sapiens
tagtggttaggattcg

SEQ ID NO: 50925 - DNA, 17 bp, Homo Sapiens
tagtggttaggattcgg

SEQ ID NO: 50926 - DNA, 18 bp, Homo Sapiens
tagtggttaggattcggc

SEQ ID NO: 50927 - DNA, 19 bp, Homo Sapiens
tagtggttaggattcggcg

SEQ ID NO: 50928 - DNA, 20 bp, Homo Sapiens
tagtggttaggattcggcgc

SEQ ID NO: 50929 - DNA, 21 bp, Homo Sapiens
tagtggttaggattcggcgct

SEQ ID NO: 50930 - DNA, 22 bp, Homo Sapiens
tagtggttaggattcggcgctc

SEQ ID NO: 50931 - DNA, 23 bp, Homo Sapiens
tagtggttaggattcggcgctct

SEQ ID NO: 50932 - DNA, 27 bp, Homo Sapiens
tagtggttaggattcggcgctctcacc

SEQ ID NO: 50933 - DNA, 29 bp, Homo Sapiens
tagtggttaggattcggcgctctcaccgc

SEQ ID NO: 50934 - DNA, 30 bp, Homo Sapiens; identical to SEQ ID NO: 24258

SEQ ID NO: 50935 - DNA, 35 bp, Homo Sapiens; identical to SEQ ID NO: 24260

SEQ ID NO: 50936 - DNA, 37 bp, Homo Sapiens; identical to SEQ ID NO: 24261

SEQ ID NO: 50937 - DNA, 41 bp, Homo Sapiens; identical to SEQ ID NO: 24265

SEQ ID NO: 50938 - DNA, 16 bp, Homo Sapiens
tagtggttagtactct

SEQ ID NO: 50939 - DNA, 17 bp, Homo Sapiens
tagtggttagtactctg

SEQ ID NO: 50940 - DNA, 18 bp, Homo Sapiens
tagtggttagtactctgc

SEQ ID NO: 50941 - DNA, 19 bp, Homo Sapiens
tagtggttagtactctgcg

SEQ ID NO: 50942 - DNA, 20 bp, Homo Sapiens
tagtggttagtactctgcgt

SEQ ID NO: 50943 - DNA, 21 bp, Homo Sapiens
tagtggttagtactctgcgtt

SEQ ID NO: 50944 - DNA, 22 bp, Homo Sapiens
tagtggttagtactctgcgttg

SEQ ID NO: 50945 - DNA, 23 bp, Homo Sapiens
tagtggttagtactctgcgttgt

SEQ ID NO: 50946 - DNA, 24 bp, Homo Sapiens
tagtggttagtactctgcgttgtg

SEQ ID NO: 50947 - DNA, 27 bp, Homo Sapiens
tagtggttagtactctgcgttgtggcc

SEQ ID NO: 50948 - DNA, 32 bp, Homo Sapiens; identical to SEQ ID NO: 24283

SEQ ID NO: 50949 - DNA, 33 bp, Homo Sapiens; identical to SEQ ID NO: 24284

SEQ ID NO: 50950 - DNA, 34 bp, Homo Sapiens; identical to SEQ ID NO: 24285

SEQ ID NO: 50951 - DNA, 36 bp, Homo Sapiens; identical to SEQ ID NO: 24286

SEQ ID NO: 50952 - DNA, 37 bp, Homo Sapiens; identical to SEQ ID NO: 24287

SEQ ID NO: 50953 - DNA, 20 bp, Homo Sapiens
tagtggttatcacgtctgct

SEQ ID NO: 50954 - DNA, 21 bp, Homo Sapiens
tagtggttatcacgtctgctt

SEQ ID NO: 50955 - DNA, 22 bp, Homo Sapiens
tagtggttatcacgtctgcttt

SEQ ID NO: 50956 - DNA, 20 bp, Homo Sapiens
tagtggttatcacgttcgcc

SEQ ID NO: 50957 - DNA, 21 bp, Homo Sapiens
tagtggttatcacgttcgcct

SEQ ID NO: 50958 - DNA, 28 bp, Homo Sapiens
tagtggttatcacgttcgcctcacacgc

SEQ ID NO: 50959 - DNA, 26 bp, Homo Sapiens
tagtgtagcggttatcacgtctgctt

SEQ ID NO: 50960 - DNA, 16 bp, Homo Sapiens
tagtgtagtggtcatc

SEQ ID NO: 50961 - DNA, 25 bp, Homo Sapiens
tagtgtagtggtcatcacgttcgcc

SEQ ID NO: 50962 - DNA, 26 bp, Homo Sapiens
tagtgtagtggtcatcacgttcgcct

SEQ ID NO: 50963 - DNA, 16 bp, Homo Sapiens
tagtgtagtggttatc

SEQ ID NO: 50964 - DNA, 26 bp, Homo Sapiens
tagtgtagtggttatcacgtctgctt

SEQ ID NO: 50965 - DNA, 27 bp, Homo Sapiens
tagtgtagtggttatcacgtctgcttt

SEQ ID NO: 50966 - DNA, 28 bp, Homo Sapiens
tagtgtagtggttatcacgtctgcttta

SEQ ID NO: 50967 - DNA, 25 bp, Homo Sapiens
tagtgtagtggttatcacgttcgcc

SEQ ID NO: 50968 - DNA, 26 bp, Homo Sapiens
tagtgtagtggttatcacgttcgcct

SEQ ID NO: 50969 - DNA, 29 bp, Homo Sapiens
tagtgtagtggttatcacgttcgcctcac

SEQ ID NO: 50970 - DNA, 30 bp, Homo Sapiens; identical to SEQ ID NO: 24367

SEQ ID NO: 50971 - DNA, 23 bp, Homo Sapiens
tataatgccgaggttgtgagttc

SEQ ID NO: 50972 - DNA, 18 bp, Homo Sapiens
tatacccttcccgtacta

SEQ ID NO: 50973 - DNA, 21 bp, Homo Sapiens
tatacccttcccgtactacca

SEQ ID NO: 50974 - DNA, 23 bp, Homo Sapiens
tatagtggtgagtatccccgcct

SEQ ID NO: 50975 - DNA, 17 bp, Homo Sapiens
tatagtggttagtactc

SEQ ID NO: 50976 - DNA, 18 bp, Homo Sapiens
tatagtggttagtactct

SEQ ID NO: 50977 - DNA, 20 bp, Homo Sapiens
tatagtggttagtactctgc

SEQ ID NO: 50978 - DNA, 21 bp, Homo Sapiens
tatagtggttagtactctgcg

SEQ ID NO: 50979 - DNA, 22 bp, Homo Sapiens
tatagtggttagtactctgcgt

SEQ ID NO: 50980 - DNA, 23 bp, Homo Sapiens
tatagtggttagtactctgcgtt

SEQ ID NO: 50981 - DNA, 25 bp, Homo Sapiens
tatagtggttagtactctgcgttgt

SEQ ID NO: 50982 - DNA, 26 bp, Homo Sapiens
tatagtggttagtactctgcgttgtg

SEQ ID NO: 50983 - DNA, 29 bp, Homo Sapiens
tatagtggttagtactctgcgttgtggcc

SEQ ID NO: 50984 - DNA, 39 bp, Homo Sapiens; identical to SEQ ID NO: 24436

SEQ ID NO: 50985 - DNA, 25 bp, Homo Sapiens
tatcattggtcgtggttgtagtccg

SEQ ID NO: 50986 - DNA, 26 bp, Homo Sapiens
tatcattggtcgtggttgtagtccgt

SEQ ID NO: 50987 - DNA, 27 bp, Homo Sapiens
tatcattggtcgtggttgtagtccgtg

SEQ ID NO: 50988 - DNA, 29 bp, Homo Sapiens
tatcattggtcgtggttgtagtccgtgcg

SEQ ID NO: 50989 - DNA, 31 bp, Homo Sapiens; identical to SEQ ID NO: 24472

SEQ ID NO: 50990 - DNA, 32 bp, Homo Sapiens; identical to SEQ ID NO: 24473

SEQ ID NO: 50991 - DNA, 33 bp, Homo Sapiens; identical to SEQ ID NO: 24474

SEQ ID NO: 50992 - DNA, 34 bp, Homo Sapiens; identical to SEQ ID NO: 24475

SEQ ID NO: 50993 - DNA, 35 bp, Homo Sapiens; identical to SEQ ID NO: 24476

SEQ ID NO: 50994 - DNA, 37 bp, Homo Sapiens; identical to SEQ ID NO: 24478

SEQ ID NO: 50995 - DNA, 38 bp, Homo Sapiens; identical to SEQ ID NO: 24479

SEQ ID NO: 50996 - DNA, 34 bp, Homo Sapiens; identical to SEQ ID NO: 24530

SEQ ID NO: 50997 - DNA, 35 bp, Homo Sapiens; identical to SEQ ID NO: 24531

SEQ ID NO: 50998 - DNA, 36 bp, Homo Sapiens; identical to SEQ ID NO: 24532

SEQ ID NO: 50999 - DNA, 37 bp, Homo Sapiens
tatgaggccccgggttcaatccccggcatctccacca

SEQ ID NO: 51000 - DNA, 33 bp, Homo Sapiens; identical to SEQ ID NO: 40649

SEQ ID NO: 51001 - DNA, 34 bp, Homo Sapiens; identical to SEQ ID NO: 40650

SEQ ID NO: 51002 - DNA, 35 bp, Homo Sapiens; identical to SEQ ID NO: 24534

SEQ ID NO: 51003 - DNA, 36 bp, Homo Sapiens; identical to SEQ ID NO: 24535

SEQ ID NO: 51004 - DNA, 37 bp, Homo Sapiens; identical to SEQ ID NO: 24536

SEQ ID NO: 51005 - DNA, 33 bp, Homo Sapiens; identical to SEQ ID NO: 40653

SEQ ID NO: 51006 - DNA, 34 bp, Homo Sapiens; identical to SEQ ID NO: 40654

SEQ ID NO: 51007 - DNA, 35 bp, Homo Sapiens; identical to SEQ ID NO: 24537

SEQ ID NO: 51008 - DNA, 36 bp, Homo Sapiens; identical to SEQ ID NO: 24538

SEQ ID NO: 51009 - DNA, 22 bp, Homo Sapiens
tatgattctcggtttgggtccg

SEQ ID NO: 51010 - DNA, 24 bp, Homo Sapiens
tatggtctagcggttaggattcct

SEQ ID NO: 51011 - DNA, 28 bp, Homo Sapiens
tatggtctagcggttaggattcctggtt

SEQ ID NO: 51012 - DNA, 46 bp, Homo Sapiens; identical to SEQ ID NO: 24605

SEQ ID NO: 51013 - DNA, 47 bp, Homo Sapiens; identical to SEQ ID NO: 24606

SEQ ID NO: 51014 - DNA, 16 bp, Homo Sapiens
tcaaacctgccggggc

SEQ ID NO: 51015 - DNA, 17 bp, Homo Sapiens
tcaaacctgccggggct

SEQ ID NO: 51016 - DNA, 18 bp, Homo Sapiens
tcaaacctgccggggctt

SEQ ID NO: 51017 - DNA, 20 bp, Homo Sapiens
tcaaacctgccggggcttcc

SEQ ID NO: 51018 - DNA, 21 bp, Homo Sapiens
tcaaacctgccggggcttcca

SEQ ID NO: 51019 - DNA, 33 bp, Homo Sapiens; identical to SEQ ID NO: 24641

SEQ ID NO: 51020 - DNA, 35 bp, Homo Sapiens; identical to SEQ ID NO: 24643

SEQ ID NO: 51021 - DNA, 36 bp, Homo Sapiens; identical to SEQ ID NO: 24644

SEQ ID NO: 51022 - DNA, 37 bp, Homo Sapiens; identical to SEQ ID NO: 24645

SEQ ID NO: 51023 - DNA, 35 bp, Homo Sapiens; identical to SEQ ID NO: 24646

SEQ ID NO: 51024 - DNA, 36 bp, Homo Sapiens; identical to SEQ ID NO: 24647

SEQ ID NO: 51025 - DNA, 37 bp, Homo Sapiens; identical to SEQ ID NO: 24648

SEQ ID NO: 51026 - DNA, 36 bp, Homo Sapiens; identical to SEQ ID NO: 24650

SEQ ID NO: 51027 - DNA, 37 bp, Homo Sapiens; identical to SEQ ID NO: 24651

SEQ ID NO: 51028 - DNA, 20 bp, Homo Sapiens
tcaaagttaaattataggct

SEQ ID NO: 51029 - DNA, 21 bp, Homo Sapiens
tcaaatcacgtcggggtcacc

SEQ ID NO: 51030 - DNA, 22 bp, Homo Sapiens
tcaaatcacgtcggggtcacca

SEQ ID NO: 51031 - DNA, 18 bp, Homo Sapiens
tcaaatcccggacgagcc

SEQ ID NO: 51032 - DNA, 19 bp, Homo Sapiens
tcaaatcccggacgagccc

SEQ ID NO: 51033 - DNA, 20 bp, Homo Sapiens
tcaaatcccggacgagcccc

SEQ ID NO: 51034 - DNA, 21 bp, Homo Sapiens
tcaaatcccggacgagccccc

SEQ ID NO: 51035 - DNA, 22 bp, Homo Sapiens
tcaaatcccggacgagccccca

SEQ ID NO: 51036 - DNA, 22 bp, Homo Sapiens
tcaaatccgggtgccccctcca

SEQ ID NO: 51037 - DNA, 19 bp, Homo Sapiens
tcaaatctcgctggggcct

SEQ ID NO: 51038 - DNA, 20 bp, Homo Sapiens
tcaaatctcgctggggcctc

SEQ ID NO: 51039 - DNA, 21 bp, Homo Sapiens
tcaaatctcgctggggcctcc

SEQ ID NO: 51040 - DNA, 22 bp, Homo Sapiens
tcaaatctcgctggggcctcca

SEQ ID NO: 51041 - DNA, 18 bp, Homo Sapiens
tcaaatctcggtggaacc

SEQ ID NO: 51042 - DNA, 19 bp, Homo Sapiens
tcaaatctcggtggaacct

SEQ ID NO: 51043 - DNA, 20 bp, Homo Sapiens
tcaaatctcggtggaacctc

SEQ ID NO: 51044 - DNA, 21 bp, Homo Sapiens
tcaaatctcggtggaacctcc

SEQ ID NO: 51045 - DNA, 22 bp, Homo Sapiens
tcaaatctcggtggaacctcca

SEQ ID NO: 51046 - DNA, 19 bp, Homo Sapiens
tcaaatctcggtgggacct

SEQ ID NO: 51047 - DNA, 20 bp, Homo Sapiens
tcaaatctcggtgggacctc

SEQ ID NO: 51048 - DNA, 21 bp, Homo Sapiens
tcaaatctcggtgggacctcc

SEQ ID NO: 51049 - DNA, 19 bp, Homo Sapiens
tcaacttaacttgaccgct

SEQ ID NO: 51050 - DNA, 20 bp, Homo Sapiens
tcaacttaacttgaccgctc

SEQ ID NO: 51051 - DNA, 22 bp, Homo Sapiens
tcaacttaacttgaccgctctg

SEQ ID NO: 51052 - DNA, 23 bp, Homo Sapiens
tcaacttaacttgaccgctctga

SEQ ID NO: 51053 - DNA, 24 bp, Homo Sapiens
tcaacttaacttgaccgctctgac

SEQ ID NO: 51054 - DNA, 25 bp, Homo Sapiens
tcaacttaacttgaccgctctgacc

SEQ ID NO: 51055 - DNA, 26 bp, Homo Sapiens
tcaacttaacttgaccgctctgacca

SEQ ID NO: 51056 - DNA, 33 bp, Homo Sapiens; identical to SEQ ID NO: 40727

SEQ ID NO: 51057 - DNA, 34 bp, Homo Sapiens; identical to SEQ ID NO: 40728

SEQ ID NO: 51058 - DNA, 35 bp, Homo Sapiens; identical to SEQ ID NO: 24715

SEQ ID NO: 51059 - DNA, 36 bp, Homo Sapiens; identical to SEQ ID NO: 24716

SEQ ID NO: 51060 - DNA, 37 bp, Homo Sapiens; identical to SEQ ID NO: 24717

SEQ ID NO: 51061 - DNA, 36 bp, Homo Sapiens; identical to SEQ ID NO: 24720

SEQ ID NO: 51062 - DNA, 37 bp, Homo Sapiens; identical to SEQ ID NO: 24721

SEQ ID NO: 51063 - DNA, 35 bp, Homo Sapiens; identical to SEQ ID NO: 24722

SEQ ID NO: 51064 - DNA, 36 bp, Homo Sapiens; identical to SEQ ID NO: 24723

SEQ ID NO: 51065 - DNA, 37 bp, Homo Sapiens; identical to SEQ ID NO: 24724

SEQ ID NO: 51066 - DNA, 21 bp, Homo Sapiens
tcaagtcacgtcggggtcacc

SEQ ID NO: 51067 - DNA, 22 bp, Homo Sapiens
tcaagtcacgtcggggtcacca

SEQ ID NO: 51068 - DNA, 19 bp, Homo Sapiens
tcaagtccctgttcgggcg

SEQ ID NO: 51069 - DNA, 20 bp, Homo Sapiens
tcaagtccctgttcgggcgc

SEQ ID NO: 51070 - DNA, 22 bp, Homo Sapiens
tcaagtccctgttcgggcgcca

SEQ ID NO: 51071 - DNA, 21 bp, Homo Sapiens
tcaatccccggcacctccacc

SEQ ID NO: 51072 - DNA, 22 bp, Homo Sapiens
tcaatccccggcacctccacca

SEQ ID NO: 51073 - DNA, 22 bp, Homo Sapiens
tcaatccccggcatctccacca

SEQ ID NO: 51074 - DNA, 20 bp, Homo Sapiens
tcaatcccgggtttcggcac

SEQ ID NO: 51075 - DNA, 22 bp, Homo Sapiens
tcaatcccgggtttcggcacca

SEQ ID NO: 51076 - DNA, 20 bp, Homo Sapiens
tcaatggtagaattctcgcc

SEQ ID NO: 51077 - DNA, 20 bp, Homo Sapiens
tcaattccccgacggggagc

SEQ ID NO: 51078 - DNA, 19 bp, Homo Sapiens
tcacaagaactgctaactc

SEQ ID NO: 51079 - DNA, 45 bp, Homo Sapiens; identical to SEQ ID NO: 24782

SEQ ID NO: 51080 - DNA, 22 bp, Homo Sapiens
tcacacgcgaaaggtccccggt

SEQ ID NO: 51081 - DNA, 22 bp, Homo Sapiens
tcacatcaccccataaacacca

SEQ ID NO: 51082 - DNA, 34 bp, Homo Sapiens; identical to SEQ ID NO: 24800

SEQ ID NO: 51083 - DNA, 36 bp, Homo Sapiens; identical to SEQ ID NO: 24802

SEQ ID NO: 51084 - DNA, 38 bp, Homo Sapiens; identical to SEQ ID NO: 24804

SEQ ID NO: 51085 - DNA, 39 bp, Homo Sapiens; identical to SEQ ID NO: 24805

SEQ ID NO: 51086 - DNA, 40 bp, Homo Sapiens; identical to SEQ ID NO: 24806

SEQ ID NO: 51087 - DNA, 41 bp, Homo Sapiens; identical to SEQ ID NO: 24807

SEQ ID NO: 51088 - DNA, 41 bp, Homo Sapiens; identical to SEQ ID NO: 24811

SEQ ID NO: 51089 - DNA, 16 bp, Homo Sapiens
tcaccccataaacacc

SEQ ID NO: 51090 - DNA, 17 bp, Homo Sapiens
tcaccccataaacacca

SEQ ID NO: 51091 - DNA, 20 bp, Homo Sapiens
tcaccgccgcggcccgggtt

SEQ ID NO: 51092 - DNA, 36 bp, Homo Sapiens; identical to SEQ ID NO: 24829

SEQ ID NO: 51093 - DNA, 37 bp, Homo Sapiens; identical to SEQ ID NO: 24830

SEQ ID NO: 51094 - DNA, 38 bp, Homo Sapiens; identical to SEQ ID NO: 24831

SEQ ID NO: 51095 - DNA, 39 bp, Homo Sapiens; identical to SEQ ID NO: 24832

SEQ ID NO: 51096 - DNA, 40 bp, Homo Sapiens; identical to SEQ ID NO: 24833

SEQ ID NO: 51097 - DNA, 41 bp, Homo Sapiens; identical to SEQ ID NO: 24834

SEQ ID NO: 51098 - DNA, 36 bp, Homo Sapiens; identical to SEQ ID NO: 24842

SEQ ID NO: 51099 - DNA, 39 bp, Homo Sapiens; identical to SEQ ID NO: 24845

SEQ ID NO: 51100 - DNA, 40 bp, Homo Sapiens; identical to SEQ ID NO: 24846

SEQ ID NO: 51101 - DNA, 41 bp, Homo Sapiens; identical to SEQ ID NO: 24847

SEQ ID NO: 51102 - DNA, 35 bp, Homo Sapiens; identical to SEQ ID NO: 24855

SEQ ID NO: 51103 - DNA, 36 bp, Homo Sapiens; identical to SEQ ID NO: 24856

SEQ ID NO: 51104 - DNA, 37 bp, Homo Sapiens; identical to SEQ ID NO: 24857

SEQ ID NO: 51105 - DNA, 38 bp, Homo Sapiens; identical to SEQ ID NO: 24858

SEQ ID NO: 51106 - DNA, 39 bp, Homo Sapiens; identical to SEQ ID NO: 24859

SEQ ID NO: 51107 - DNA, 40 bp, Homo Sapiens; identical to SEQ ID NO: 24860

SEQ ID NO: 51108 - DNA, 41 bp, Homo Sapiens; identical to SEQ ID NO: 24861

SEQ ID NO: 51109 - DNA, 16 bp, Homo Sapiens
tcacgtcggggtcacc

SEQ ID NO: 51110 - DNA, 17 bp, Homo Sapiens
tcacgtcggggtcacca

SEQ ID NO: 51111 - DNA, 35 bp, Homo Sapiens; identical to SEQ ID NO: 24879

SEQ ID NO: 51112 - DNA, 36 bp, Homo Sapiens; identical to SEQ ID NO: 24880

SEQ ID NO: 51113 - DNA, 37 bp, Homo Sapiens; identical to SEQ ID NO: 24881

SEQ ID NO: 51114 - DNA, 38 bp, Homo Sapiens; identical to SEQ ID NO: 24882

SEQ ID NO: 51115 - DNA, 18 bp, Homo Sapiens
tcagaagattctaggttc

SEQ ID NO: 51116 - DNA, 37 bp, Homo Sapiens; identical to SEQ ID NO: 24892

SEQ ID NO: 51117 - DNA, 35 bp, Homo Sapiens; identical to SEQ ID NO: 24898

SEQ ID NO: 51118 - DNA, 37 bp, Homo Sapiens; identical to SEQ ID NO: 24900

SEQ ID NO: 51119 - DNA, 35 bp, Homo Sapiens; identical to SEQ ID NO: 24901

SEQ ID NO: 51120 - DNA, 36 bp, Homo Sapiens; identical to SEQ ID NO: 24905

SEQ ID NO: 51121 - DNA, 37 bp, Homo Sapiens; identical to SEQ ID NO: 24906

SEQ ID NO: 51122 - DNA, 38 bp, Homo Sapiens; identical to SEQ ID NO: 24907

SEQ ID NO: 51123 - DNA, 36 bp, Homo Sapiens; identical to SEQ ID NO: 24911

SEQ ID NO: 51124 - DNA, 37 bp, Homo Sapiens; identical to SEQ ID NO: 24912

SEQ ID NO: 51125 - DNA, 38 bp, Homo Sapiens; identical to SEQ ID NO: 24913

SEQ ID NO: 51126 - DNA, 18 bp, Homo Sapiens
tcagaagattgcaggttc

SEQ ID NO: 51127 - DNA, 34 bp, Homo Sapiens; identical to SEQ ID NO: 24920

SEQ ID NO: 51128 - DNA, 35 bp, Homo Sapiens; identical to SEQ ID NO: 24921

SEQ ID NO: 51129 - DNA, 36 bp, Homo Sapiens; identical to SEQ ID NO: 24922

SEQ ID NO: 51130 - DNA, 37 bp, Homo Sapiens; identical to SEQ ID NO: 24923

SEQ ID NO: 51131 - DNA, 38 bp, Homo Sapiens; identical to SEQ ID NO: 24924

SEQ ID NO: 51132 - DNA, 18 bp, Homo Sapiens
tcagaaggctgcgtgttc

SEQ ID NO: 51133 - DNA, 32 bp, Homo Sapiens; identical to SEQ ID NO: 24937

SEQ ID NO: 51134 - DNA, 33 bp, Homo Sapiens; identical to SEQ ID NO: 24938

SEQ ID NO: 51135 - DNA, 34 bp, Homo Sapiens; identical to SEQ ID NO: 24939

SEQ ID NO: 51136 - DNA, 35 bp, Homo Sapiens; identical to SEQ ID NO: 24940

SEQ ID NO: 51137 - DNA, 36 bp, Homo Sapiens; identical to SEQ ID NO: 24941

SEQ ID NO: 51138 - DNA, 37 bp, Homo Sapiens; identical to SEQ ID NO: 24942

SEQ ID NO: 51139 - DNA, 38 bp, Homo Sapiens; identical to SEQ ID NO: 24943

SEQ ID NO: 51140 - DNA, 33 bp, Homo Sapiens; identical to SEQ ID NO: 24951

SEQ ID NO: 51141 - DNA, 35 bp, Homo Sapiens; identical to SEQ ID NO: 24953

SEQ ID NO: 51142 - DNA, 36 bp, Homo Sapiens; identical to SEQ ID NO: 24954

SEQ ID NO: 51143 - DNA, 37 bp, Homo Sapiens; identical to SEQ ID NO: 24955

SEQ ID NO: 51144 - DNA, 38 bp, Homo Sapiens; identical to SEQ ID NO: 24956

SEQ ID NO: 51145 - DNA, 32 bp, Homo Sapiens; identical to SEQ ID NO: 24960

SEQ ID NO: 51146 - DNA, 34 bp, Homo Sapiens; identical to SEQ ID NO: 24962

SEQ ID NO: 51147 - DNA, 35 bp, Homo Sapiens; identical to SEQ ID NO: 24963

SEQ ID NO: 51148 - DNA, 36 bp, Homo Sapiens; identical to SEQ ID NO: 24964

SEQ ID NO: 51149 - DNA, 37 bp, Homo Sapiens; identical to SEQ ID NO: 24965

SEQ ID NO: 51150 - DNA, 38 bp, Homo Sapiens; identical to SEQ ID NO: 24966

SEQ ID NO: 51151 - DNA, 27 bp, Homo Sapiens
tcagattgtgaatctgacaacagaggc

SEQ ID NO: 51152 - DNA, 28 bp, Homo Sapiens
tcagattgtgaatctgacaacagaggct

SEQ ID NO: 51153 - DNA, 47 bp, Homo Sapiens; identical to SEQ ID NO: 24992

SEQ ID NO: 51154 - DNA, 24 bp, Homo Sapiens
tcagcctccggagctggggattgt

SEQ ID NO: 51155 - DNA, 23 bp, Homo Sapiens
tcagctaaataagctatcgggcc

SEQ ID NO: 51156 - DNA, 17 bp, Homo Sapiens
tcaggatggccgagcgg

SEQ ID NO: 51157 - DNA, 21 bp, Homo Sapiens
tcaggatggccgagcggtcta

SEQ ID NO: 51158 - DNA, 21 bp, Homo Sapiens
tcaggggtagagcatttgact

SEQ ID NO: 51159 - DNA, 22 bp, Homo Sapiens
tcaggggttagagcactggtct

SEQ ID NO: 51160 - DNA, 35 bp, Homo Sapiens; identical to SEQ ID NO: 25066

SEQ ID NO: 51161 - DNA, 27 bp, Homo Sapiens
tcagtaagttgcaatacttaatttctg

SEQ ID NO: 51162 - DNA, 16 bp, Homo Sapiens
tcagtcggtagagcat

SEQ ID NO: 51163 - DNA, 17 bp, Homo Sapiens
tcagtcggtagagcatc

SEQ ID NO: 51164 - DNA, 18 bp, Homo Sapiens
tcagtcggtagagcatca

SEQ ID NO: 51165 - DNA, 20 bp, Homo Sapiens
tcagtcggtagagcatcaga

SEQ ID NO: 51166 - DNA, 21 bp, Homo Sapiens
tcagtcggtagagcatcagac

SEQ ID NO: 51167 - DNA, 22 bp, Homo Sapiens
tcagtcggtagagcatcagact

SEQ ID NO: 51168 - DNA, 24 bp, Homo Sapiens
tcagtcggtagagcatcagacttt

SEQ ID NO: 51169 - DNA, 17 bp, Homo Sapiens
tcagtcggtagagcatg

SEQ ID NO: 51170 - DNA, 21 bp, Homo Sapiens
tcagtcggtagagcatgagac

SEQ ID NO: 51171 - DNA, 22 bp, Homo Sapiens
tcagtcggtagagcatgagact

SEQ ID NO: 51172 - DNA, 31 bp, Homo Sapiens; identical to SEQ ID NO: 25110

SEQ ID NO: 51173 - DNA, 44 bp, Homo Sapiens; identical to SEQ ID NO: 25115

SEQ ID NO: 51174 - DNA, 19 bp, Homo Sapiens
tcagtcggtagagcatggg

SEQ ID NO: 51175 - DNA, 20 bp, Homo Sapiens
tcagtcggtagagcatggga

SEQ ID NO: 51176 - DNA, 21 bp, Homo Sapiens
tcagtcggtagagcatgggac

SEQ ID NO: 51177 - DNA, 22 bp, Homo Sapiens
tcagtcggtagagcatgggact

SEQ ID NO: 51178 - DNA, 23 bp, Homo Sapiens
tcagtcggtagagcatgggactc

SEQ ID NO: 51179 - DNA, 24 bp, Homo Sapiens
tcagtcggtagagcatgggactct

SEQ ID NO: 51180 - DNA, 28 bp, Homo Sapiens
tcagtcggtagagcatgggactcttaat

SEQ ID NO: 51181 - DNA, 29 bp, Homo Sapiens
tcagtcggtagagcatgggactcttaatc

SEQ ID NO: 51182 - DNA, 30 bp, Homo Sapiens; identical to SEQ ID NO: 25126

SEQ ID NO: 51183 - DNA, 31 bp, Homo Sapiens; identical to SEQ ID NO: 25127

SEQ ID NO: 51184 - DNA, 32 bp, Homo Sapiens; identical to SEQ ID NO: 25128

SEQ ID NO: 51185 - DNA, 44 bp, Homo Sapiens; identical to SEQ ID NO: 25131

SEQ ID NO: 51186 - DNA, 16 bp, Homo Sapiens
tcagtctcataatctg

SEQ ID NO: 51187 - DNA, 18 bp, Homo Sapiens
tcagtggtagaattctcg

SEQ ID NO: 51188 - DNA, 19 bp, Homo Sapiens
tcagtggtagaattctcgc

SEQ ID NO: 51189 - DNA, 20 bp, Homo Sapiens
tcagtggtagaattctcgcc

SEQ ID NO: 51190 - DNA, 21 bp, Homo Sapiens
tcagtggtagaattctcgcct

SEQ ID NO: 51191 - DNA, 22 bp, Homo Sapiens
tcagtggtagaattctcgcctg

SEQ ID NO: 51192 - DNA, 23 bp, Homo Sapiens
tcagtggtagaattctcgcctgc

SEQ ID NO: 51193 - DNA, 24 bp, Homo Sapiens
tcagtggtagaattctcgcctgcc

SEQ ID NO: 51194 - DNA, 32 bp, Homo Sapiens; identical to SEQ ID NO: 25160

SEQ ID NO: 51195 - DNA, 37 bp, Homo Sapiens; identical to SEQ ID NO: 25162

SEQ ID NO: 51196 - DNA, 41 bp, Homo Sapiens; identical to SEQ ID NO: 25166

SEQ ID NO: 51197 - DNA, 21 bp, Homo Sapiens
tcagtggtagagcatttgact

SEQ ID NO: 51198 - DNA, 36 bp, Homo Sapiens; identical to SEQ ID NO: 25188

SEQ ID NO: 51199 - DNA, 43 bp, Homo Sapiens; identical to SEQ ID NO: 25210

SEQ ID NO: 51200 - DNA, 44 bp, Homo Sapiens; identical to SEQ ID NO: 25211

SEQ ID NO: 51201 - DNA, 35 bp, Homo Sapiens; identical to SEQ ID NO: 25235

SEQ ID NO: 51202 - DNA, 36 bp, Homo Sapiens; identical to SEQ ID NO: 25236

SEQ ID NO: 51203 - DNA, 37 bp, Homo Sapiens; identical to SEQ ID NO: 25237

SEQ ID NO: 51204 - DNA, 38 bp, Homo Sapiens; identical to SEQ ID NO: 25238

SEQ ID NO: 51205 - DNA, 40 bp, Homo Sapiens; identical to SEQ ID NO: 25240

SEQ ID NO: 51206 - DNA, 41 bp, Homo Sapiens; identical to SEQ ID NO: 25241

SEQ ID NO: 51207 - DNA, 27 bp, Homo Sapiens
tcatgcccccatgtctaacaacatggc

SEQ ID NO: 51208 - DNA, 28 bp, Homo Sapiens
tcatgcccccatgtctaacaacatggct

SEQ ID NO: 51209 - DNA, 29 bp, Homo Sapiens
tcatgcccccatgtctaacaacatggctt

SEQ ID NO: 51210 - DNA, 33 bp, Homo Sapiens; identical to SEQ ID NO: 25270

SEQ ID NO: 51211 - DNA, 34 bp, Homo Sapiens; identical to SEQ ID NO: 25271

SEQ ID NO: 51212 - DNA, 37 bp, Homo Sapiens; identical to SEQ ID NO: 25274

SEQ ID NO: 51213 - DNA, 22 bp, Homo Sapiens
tcattggtcgtggttgtagtcc

SEQ ID NO: 51214 - DNA, 27 bp, Homo Sapiens
tcattggtcgtggttgtagtccgtgcg

SEQ ID NO: 51215 - DNA, 29 bp, Homo Sapiens
tcattggtcgtggttgtagtccgtgcgag

SEQ ID NO: 51216 - DNA, 30 bp, Homo Sapiens; identical to SEQ ID NO: 25296

SEQ ID NO: 51217 - DNA, 31 bp, Homo Sapiens; identical to SEQ ID NO: 25297

SEQ ID NO: 51218 - DNA, 32 bp, Homo Sapiens; identical to SEQ ID NO: 25298

SEQ ID NO: 51219 - DNA, 33 bp, Homo Sapiens; identical to SEQ ID NO: 25299

SEQ ID NO: 51220 - DNA, 35 bp, Homo Sapiens; identical to SEQ ID NO: 25301

SEQ ID NO: 51221 - DNA, 36 bp, Homo Sapiens; identical to SEQ ID NO: 25302

SEQ ID NO: 51222 - DNA, 37 bp, Homo Sapiens; identical to SEQ ID NO: 40951

SEQ ID NO: 51223 - DNA, 38 bp, Homo Sapiens; identical to SEQ ID NO: 40952

SEQ ID NO: 51224 - DNA, 39 bp, Homo Sapiens; identical to SEQ ID NO: 25320

SEQ ID NO: 51225 - DNA, 40 bp, Homo Sapiens; identical to SEQ ID NO: 25321

SEQ ID NO: 51226 - DNA, 46 bp, Homo Sapiens; identical to SEQ ID NO: 25326

SEQ ID NO: 51227 - DNA, 34 bp, Homo Sapiens; identical to SEQ ID NO: 25349

SEQ ID NO: 51228 - DNA, 35 bp, Homo Sapiens; identical to SEQ ID NO: 25350

SEQ ID NO: 51229 - DNA, 34 bp, Homo Sapiens; identical to SEQ ID NO: 25361

SEQ ID NO: 51230 - DNA, 16 bp, Homo Sapiens
tccagctcgaaggacc

SEQ ID NO: 51231 - DNA, 26 bp, Homo Sapiens
tccagggttcaagtccctgttcgggc

SEQ ID NO: 51232 - DNA, 27 bp, Homo Sapiens
tccagggttcaagtccctgttcgggcg

SEQ ID NO: 51233 - DNA, 28 bp, Homo Sapiens
tccagggttcaagtccctgttcgggcgc

SEQ ID NO: 51234 - DNA, 29 bp, Homo Sapiens
tccagggttcaagtccctgttcgggcgcc

SEQ ID NO: 51235 - DNA, 30 bp, Homo Sapiens; identical to SEQ ID NO: 25372

SEQ ID NO: 51236 - DNA, 26 bp, Homo Sapiens
tccaggttcgactcctggctggctcg

SEQ ID NO: 51237 - DNA, 28 bp, Homo Sapiens
tccaggttcgactcctggctggctcgcc

SEQ ID NO: 51238 - DNA, 45 bp, Homo Sapiens; identical to SEQ ID NO: 25383

SEQ ID NO: 51239 - DNA, 45 bp, Homo Sapiens; identical to SEQ ID NO: 25385

SEQ ID NO: 51240 - DNA, 30 bp, Homo Sapiens
tccatagtgtagtggttatcacatctgctt

SEQ ID NO: 51241 - DNA, 17 bp, Homo Sapiens
tccattggggtttcccc

SEQ ID NO: 51242 - DNA, 21 bp, Homo Sapiens
tccattggggtttccccgcgc

SEQ ID NO: 51243 - DNA, 22 bp, Homo Sapiens
tccattggggtttccccgcgca

SEQ ID NO: 51244 - DNA, 24 bp, Homo Sapiens
tccattggggtttccccgcgcagg

SEQ ID NO: 51245 - DNA, 25 bp, Homo Sapiens
tccattggggtttccccgcgcaggt

SEQ ID NO: 51246 - DNA, 46 bp, Homo Sapiens; identical to SEQ ID NO: 25444

SEQ ID NO: 51247 - DNA, 47 bp, Homo Sapiens; identical to SEQ ID NO: 25445

SEQ ID NO: 51248 - DNA, 46 bp, Homo Sapiens; identical to SEQ ID NO: 25461

SEQ ID NO: 51249 - DNA, 47 bp, Homo Sapiens; identical to SEQ ID NO: 25462

SEQ ID NO: 51250 - DNA, 16 bp, Homo Sapiens
tcccacatggtctagc

SEQ ID NO: 51251 - DNA, 17 bp, Homo Sapiens
tcccacatggtctagcg

SEQ ID NO: 51252 - DNA, 18 bp, Homo Sapiens
tcccacatggtctagcgg

SEQ ID NO: 51253 - DNA, 19 bp, Homo Sapiens
tcccacatggtctagcggt

SEQ ID NO: 51254 - DNA, 20 bp, Homo Sapiens
tcccacatggtctagcggtt

SEQ ID NO: 51255 - DNA, 22 bp, Homo Sapiens
tcccacatggtctagcggttag

SEQ ID NO: 51256 - DNA, 23 bp, Homo Sapiens
tcccacatggtctagcggttagg

SEQ ID NO: 51257 - DNA, 25 bp, Homo Sapiens
tcccacatggtctagcggttaggat

SEQ ID NO: 51258 - DNA, 26 bp, Homo Sapiens
tcccacatggtctagcggttaggatt

SEQ ID NO: 51259 - DNA, 27 bp, Homo Sapiens
tcccacatggtctagcggttaggattc

SEQ ID NO: 51260 - DNA, 28 bp, Homo Sapiens
tcccacatggtctagcggttaggattcc

SEQ ID NO: 51261 - DNA, 29 bp, Homo Sapiens
tcccacatggtctagcggttaggattcct

SEQ ID NO: 51262 - DNA, 30 bp, Homo Sapiens; identical to SEQ ID NO: 25476

SEQ ID NO: 51263 - DNA, 31 bp, Homo Sapiens; identical to SEQ ID NO: 25477

SEQ ID NO: 51264 - DNA, 32 bp, Homo Sapiens; identical to SEQ ID NO: 25478

SEQ ID NO: 51265 - DNA, 33 bp, Homo Sapiens; identical to SEQ ID NO: 25479

SEQ ID NO: 51266 - DNA, 34 bp, Homo Sapiens; identical to SEQ ID NO: 25480

SEQ ID NO: 51267 - DNA, 35 bp, Homo Sapiens; identical to SEQ ID NO: 25481

SEQ ID NO: 51268 - DNA, 36 bp, Homo Sapiens; identical to SEQ ID NO: 25482

SEQ ID NO: 51269 - DNA, 37 bp, Homo Sapiens; identical to SEQ ID NO: 25483

SEQ ID NO: 51270 - DNA, 39 bp, Homo Sapiens; identical to SEQ ID NO: 25485

SEQ ID NO: 51271 - DNA, 40 bp, Homo Sapiens; identical to SEQ ID NO: 25486

SEQ ID NO: 51272 - DNA, 41 bp, Homo Sapiens; identical to SEQ ID NO: 25487

SEQ ID NO: 51273 - DNA, 42 bp, Homo Sapiens; identical to SEQ ID NO: 25488

SEQ ID NO: 51274 - DNA, 43 bp, Homo Sapiens; identical to SEQ ID NO: 41033

SEQ ID NO: 51275 - DNA, 16 bp, Homo Sapiens
tcccaccactgccacc

SEQ ID NO: 51276 - DNA, 16 bp, Homo Sapiens
tcccaccagagtcgcc

SEQ ID NO: 51277 - DNA, 17 bp, Homo Sapiens
tcccacccagggacgcc

SEQ ID NO: 51278 - DNA, 18 bp, Homo Sapiens
tcccacccagggacgcca

SEQ ID NO: 51279 - DNA, 16 bp, Homo Sapiens
tcccaccgctgccacc

SEQ ID NO: 51280 - DNA, 17 bp, Homo Sapiens
tcccaccgctgccacca

SEQ ID NO: 51281 - DNA, 16 bp, Homo Sapiens
tcccacctggggtacc

SEQ ID NO: 51282 - DNA, 16 bp, Homo Sapiens
tcccacctggggtgcc

SEQ ID NO: 51283 - DNA, 17 bp, Homo Sapiens
tcccacctggggtgcca

SEQ ID NO: 51284 - DNA, 16 bp, Homo Sapiens
tcccaccttcgtcgcc

SEQ ID NO: 51285 - DNA, 17 bp, Homo Sapiens
tcccaccttcgtcgcca

SEQ ID NO: 51286 - DNA, 16 bp, Homo Sapiens
tcccactcctgacacc

SEQ ID NO: 51287 - DNA, 17 bp, Homo Sapiens
tcccactcctgacacca

SEQ ID NO: 51288 - DNA, 16 bp, Homo Sapiens
tcccacttctgacacc

SEQ ID NO: 51289 - DNA, 17 bp, Homo Sapiens
tcccacttctgacacca

SEQ ID NO: 51290 - DNA, 16 bp, Homo Sapiens
tcccagcggggcctcc

SEQ ID NO: 51291 - DNA, 16 bp, Homo Sapiens
tcccagcggtgcctcc

SEQ ID NO: 51292 - DNA, 37 bp, Homo Sapiens; identical to SEQ ID NO: 25512

SEQ ID NO: 51293 - DNA, 16 bp, Homo Sapiens
tcccagtagagcctcc

SEQ ID NO: 51294 - DNA, 16 bp, Homo Sapiens
tcccatatggtctagc

SEQ ID NO: 51295 - DNA, 17 bp, Homo Sapiens
tcccatatggtctagcg

SEQ ID NO: 51296 - DNA, 18 bp, Homo Sapiens
tcccatatggtctagcgg

SEQ ID NO: 51297 - DNA, 19 bp, Homo Sapiens
tcccatatggtctagcggt

SEQ ID NO: 51298 - DNA, 22 bp, Homo Sapiens
tcccatatggtctagcggttag

SEQ ID NO: 51299 - DNA, 23 bp, Homo Sapiens
tcccatatggtctagcggttagg

SEQ ID NO: 51300 - DNA, 25 bp, Homo Sapiens
tcccatatggtctagcggttaggat

SEQ ID NO: 51301 - DNA, 26 bp, Homo Sapiens
tcccatatggtctagcggttaggatt

SEQ ID NO: 51302 - DNA, 27 bp, Homo Sapiens
tcccatatggtctagcggttaggattc

SEQ ID NO: 51303 - DNA, 28 bp, Homo Sapiens
tcccatatggtctagcggttaggattcc

SEQ ID NO: 51304 - DNA, 29 bp, Homo Sapiens
tcccatatggtctagcggttaggattcct

SEQ ID NO: 51305 - DNA, 30 bp, Homo Sapiens; identical to SEQ ID NO: 25530

SEQ ID NO: 51306 - DNA, 31 bp, Homo Sapiens; identical to SEQ ID NO: 25531

SEQ ID NO: 51307 - DNA, 32 bp, Homo Sapiens; identical to SEQ ID NO: 25532

SEQ ID NO: 51308 - DNA, 33 bp, Homo Sapiens; identical to SEQ ID NO: 25533

SEQ ID NO: 51309 - DNA, 34 bp, Homo Sapiens; identical to SEQ ID NO: 25534

SEQ ID NO: 51310 - DNA, 35 bp, Homo Sapiens; identical to SEQ ID NO: 25535

SEQ ID NO: 51311 - DNA, 36 bp, Homo Sapiens; identical to SEQ ID NO: 25536

SEQ ID NO: 51312 - DNA, 42 bp, Homo Sapiens; identical to SEQ ID NO: 25542

SEQ ID NO: 51313 - DNA, 16 bp, Homo Sapiens
tcccatcctcgtcgcc

SEQ ID NO: 51314 - DNA, 17 bp, Homo Sapiens
tcccatcctcgtcgcca

SEQ ID NO: 51315 - DNA, 16 bp, Homo Sapiens
tcccatctggggtgcc

SEQ ID NO: 51316 - DNA, 16 bp, Homo Sapiens
tcccatctgggtcgcc

SEQ ID NO: 51317 - DNA, 27 bp, Homo Sapiens
tcccatggtgtaatggttagcactctg

SEQ ID NO: 51318 - DNA, 16 bp, Homo Sapiens
tcccattggtctagcc

SEQ ID NO: 51319 - DNA, 16 bp, Homo Sapiens
tccccagcatctccac

SEQ ID NO: 51320 - DNA, 17 bp, Homo Sapiens
tccccagcatctccacc

SEQ ID NO: 51321 - DNA, 18 bp, Homo Sapiens
tccccagcatctccacca

SEQ ID NO: 51322 - DNA, 18 bp, Homo Sapiens
tccccagtacctccacca

SEQ ID NO: 51323 - DNA, 22 bp, Homo Sapiens
tccccgcgcaggttcgaaccct

SEQ ID NO: 51324 - DNA, 22 bp, Homo Sapiens
tccccgcgcaggttcgaatcct

SEQ ID NO: 51325 - DNA, 16 bp, Homo Sapiens
tccccggcacctccac

SEQ ID NO: 51326 - DNA, 17 bp, Homo Sapiens
tccccggcacctccacc

SEQ ID NO: 51327 - DNA, 18 bp, Homo Sapiens
tccccggcacctccacca

SEQ ID NO: 51328 - DNA, 16 bp, Homo Sapiens
tccccggcatctccac

SEQ ID NO: 51329 - DNA, 17 bp, Homo Sapiens
tccccggcatctccacc

SEQ ID NO: 51330 - DNA, 18 bp, Homo Sapiens
tccccggcatctccacca

SEQ ID NO: 51331 - DNA, 23 bp, Homo Sapiens
tccccggttcgaaaccgggcgga

SEQ ID NO: 51332 - DNA, 16 bp, Homo Sapiens
tccccgtacgggccac

SEQ ID NO: 51333 - DNA, 17 bp, Homo Sapiens
tccccgtacgggccacc

SEQ ID NO: 51334 - DNA, 18 bp, Homo Sapiens
tccccgtacgggccacca

SEQ ID NO: 51335 - DNA, 17 bp, Homo Sapiens
tccccgtactggccacc

SEQ ID NO: 51336 - DNA, 16 bp, Homo Sapiens
tcccggacgagccccc

SEQ ID NO: 51337 - DNA, 17 bp, Homo Sapiens
tcccggacgagccccca

SEQ ID NO: 51338 - DNA, 16 bp, Homo Sapiens
tcccggccaacgcacc

SEQ ID NO: 51339 - DNA, 17 bp, Homo Sapiens
tcccggccaacgcacca

SEQ ID NO: 51340 - DNA, 16 bp, Homo Sapiens
tcccggccaatgcacc

SEQ ID NO: 51341 - DNA, 17 bp, Homo Sapiens
tcccggccaatgcacca

SEQ ID NO: 51342 - DNA, 16 bp, Homo Sapiens
tcccggccactgcacc

SEQ ID NO: 51343 - DNA, 17 bp, Homo Sapiens
tcccggccagtgcacca

SEQ ID NO: 51344 - DNA, 16 bp, Homo Sapiens
tcccggcccatgcacc

SEQ ID NO: 51345 - DNA, 17 bp, Homo Sapiens
tcccggcccatgcacca

SEQ ID NO: 51346 - DNA, 16 bp, Homo Sapiens
tcccggcggagtcgcc

SEQ ID NO: 51347 - DNA, 17 bp, Homo Sapiens
tcccggcggagtcgcca

SEQ ID NO: 51348 - DNA, 16 bp, Homo Sapiens
tcccgggcggaaacac

SEQ ID NO: 51349 - DNA, 17 bp, Homo Sapiens
tcccgggcggaaacacc

SEQ ID NO: 51350 - DNA, 16 bp, Homo Sapiens
tcccgggcggcgcacc

SEQ ID NO: 51351 - DNA, 17 bp, Homo Sapiens
tcccgggcggcgcacca

SEQ ID NO: 51352 - DNA, 16 bp, Homo Sapiens
tcccgggtttcggcac

SEQ ID NO: 51353 - DNA, 17 bp, Homo Sapiens
tcccgggtttcggcacc

SEQ ID NO: 51354 - DNA, 18 bp, Homo Sapiens
tcccgggtttcggcacca

SEQ ID NO: 51355 - DNA, 16 bp, Homo Sapiens
tcccggtatgggaacc

SEQ ID NO: 51356 - DNA, 16 bp, Homo Sapiens
tcccggtcagggaacc

SEQ ID NO: 51357 - DNA, 17 bp, Homo Sapiens
tcccggtcagggaacca

SEQ ID NO: 51358 - DNA, 16 bp, Homo Sapiens
tcccggtgtgggaacc

SEQ ID NO: 51359 - DNA, 17 bp, Homo Sapiens
tcccggtgtgggaacca

SEQ ID NO: 51360 - DNA, 19 bp, Homo Sapiens
tccctggtctagtggttag

SEQ ID NO: 51361 - DNA, 22 bp, Homo Sapiens
tccctggtctagtggttaggat

SEQ ID NO: 51362 - DNA, 23 bp, Homo Sapiens
tccctggtctagtggttaggatt

SEQ ID NO: 51363 - DNA, 16 bp, Homo Sapiens
tccctggtggtctagt

SEQ ID NO: 51364 - DNA, 17 bp, Homo Sapiens
tccctggtggtctagtg

SEQ ID NO: 51365 - DNA, 18 bp, Homo Sapiens
tccctggtggtctagtgg

SEQ ID NO: 51366 - DNA, 19 bp, Homo Sapiens
tccctggtggtctagtggc

SEQ ID NO: 51367 - DNA, 20 bp, Homo Sapiens
tccctggtggtctagtggct

SEQ ID NO: 51368 - DNA, 22 bp, Homo Sapiens
tccctggtggtctagtggctag

SEQ ID NO: 51369 - DNA, 27 bp, Homo Sapiens
tccctggtggtctagtggctaggattc

SEQ ID NO: 51370 - DNA, 28 bp, Homo Sapiens
tccctggtggtctagtggctaggattcg

SEQ ID NO: 51371 - DNA, 29 bp, Homo Sapiens
tccctggtggtctagtggctaggattcgg

SEQ ID NO: 51372 - DNA, 30 bp, Homo Sapiens; identical to SEQ ID NO: 25675

SEQ ID NO: 51373 - DNA, 31 bp, Homo Sapiens; identical to SEQ ID NO: 25676

SEQ ID NO: 51374 - DNA, 32 bp, Homo Sapiens; identical to SEQ ID NO: 25677

SEQ ID NO: 51375 - DNA, 33 bp, Homo Sapiens; identical to SEQ ID NO: 25678

SEQ ID NO: 51376 - DNA, 34 bp, Homo Sapiens; identical to SEQ ID NO: 25679

SEQ ID NO: 51377 - DNA, 35 bp, Homo Sapiens; identical to SEQ ID NO: 25680

SEQ ID NO: 51378 - DNA, 36 bp, Homo Sapiens; identical to SEQ ID NO: 25681

SEQ ID NO: 51379 - DNA, 39 bp, Homo Sapiens; identical to SEQ ID NO: 25684

SEQ ID NO: 51380 - DNA, 19 bp, Homo Sapiens
tccctggtggtctagtggt

SEQ ID NO: 51381 - DNA, 20 bp, Homo Sapiens
tccctggtggtctagtggtt

SEQ ID NO: 51382 - DNA, 22 bp, Homo Sapiens
tccctggtggtctagtggttag

SEQ ID NO: 51383 - DNA, 23 bp, Homo Sapiens
tccctggtggtctagtggttagg

SEQ ID NO: 51384 - DNA, 24 bp, Homo Sapiens
tccctggtggtctagtggttagga

SEQ ID NO: 51385 - DNA, 25 bp, Homo Sapiens
tccctggtggtctagtggttaggat

SEQ ID NO: 51386 - DNA, 26 bp, Homo Sapiens
tccctggtggtctagtggttaggatt

SEQ ID NO: 51387 - DNA, 27 bp, Homo Sapiens
tccctggtggtctagtggttaggattc

SEQ ID NO: 51388 - DNA, 28 bp, Homo Sapiens
tccctggtggtctagtggttaggattcg

SEQ ID NO: 51389 - DNA, 29 bp, Homo Sapiens
tccctggtggtctagtggttaggattcgg

SEQ ID NO: 51390 - DNA, 30 bp, Homo Sapiens; identical to SEQ ID NO: 25700

SEQ ID NO: 51391 - DNA, 31 bp, Homo Sapiens; identical to SEQ ID NO: 25701

SEQ ID NO: 51392 - DNA, 32 bp, Homo Sapiens; identical to SEQ ID NO: 25702

SEQ ID NO: 51393 - DNA, 33 bp, Homo Sapiens; identical to SEQ ID NO: 25703

SEQ ID NO: 51394 - DNA, 34 bp, Homo Sapiens; identical to SEQ ID NO: 25704

SEQ ID NO: 51395 - DNA, 35 bp, Homo Sapiens; identical to SEQ ID NO: 25705

SEQ ID NO: 51396 - DNA, 36 bp, Homo Sapiens; identical to SEQ ID NO: 25706

SEQ ID NO: 51397 - DNA, 37 bp, Homo Sapiens; identical to SEQ ID NO: 25707

SEQ ID NO: 51398 - DNA, 38 bp, Homo Sapiens; identical to SEQ ID NO: 25708

SEQ ID NO: 51399 - DNA, 39 bp, Homo Sapiens; identical to SEQ ID NO: 25709

SEQ ID NO: 51400 - DNA, 40 bp, Homo Sapiens; identical to SEQ ID NO: 25710

SEQ ID NO: 51401 - DNA, 41 bp, Homo Sapiens; identical to SEQ ID NO: 25711

SEQ ID NO: 51402 - DNA, 42 bp, Homo Sapiens; identical to SEQ ID NO: 25712

SEQ ID NO: 51403 - DNA, 46 bp, Homo Sapiens; identical to SEQ ID NO: 25716

SEQ ID NO: 51404 - DNA, 47 bp, Homo Sapiens; identical to SEQ ID NO: 25717

SEQ ID NO: 51405 - DNA, 27 bp, Homo Sapiens
tccctggttcgatcccgggtttcggca

SEQ ID NO: 51406 - DNA, 28 bp, Homo Sapiens
tccctggttcgatcccgggtttcggcac

SEQ ID NO: 51407 - DNA, 30 bp, Homo Sapiens; identical to SEQ ID NO: 25729

SEQ ID NO: 51408 - DNA, 16 bp, Homo Sapiens
tccctgtggtctagtg

SEQ ID NO: 51409 - DNA, 17 bp, Homo Sapiens
tccctgtggtctagtgg

SEQ ID NO: 51410 - DNA, 18 bp, Homo Sapiens
tccctgtggtctagtggt

SEQ ID NO: 51411 - DNA, 21 bp, Homo Sapiens
tccctgtggtctagtggttag

SEQ ID NO: 51412 - DNA, 16 bp, Homo Sapiens
tccctgttcgggcgcc

SEQ ID NO: 51413 - DNA, 17 bp, Homo Sapiens
tccctgttcgggcgcca

SEQ ID NO: 51414 - DNA, 16 bp, Homo Sapiens
tcccttcgtggtcgcc

SEQ ID NO: 51415 - DNA, 17 bp, Homo Sapiens
tcccttcgtggtcgcca

SEQ ID NO: 51416 - DNA, 37 bp, Homo Sapiens; identical to SEQ ID NO: 25746

SEQ ID NO: 51417 - DNA, 16 bp, Homo Sapiens
tccgagtcacggcacc

SEQ ID NO: 51418 - DNA, 17 bp, Homo Sapiens
tccgagtcacggcacca

SEQ ID NO: 51419 - DNA, 26 bp, Homo Sapiens
tccgagttcaaatctcggtgggacct

SEQ ID NO: 51420 - DNA, 27 bp, Homo Sapiens
tccgagttcaaatctcggtgggacctc

SEQ ID NO: 51421 - DNA, 19 bp, Homo Sapiens
tccggatggaggcgtgggt

SEQ ID NO: 51422 - DNA, 38 bp, Homo Sapiens; identical to SEQ ID NO: 25794

SEQ ID NO: 51423 - DNA, 39 bp, Homo Sapiens; identical to SEQ ID NO: 25795

SEQ ID NO: 51424 - DNA, 40 bp, Homo Sapiens; identical to SEQ ID NO: 25796

SEQ ID NO: 51425 - DNA, 41 bp, Homo Sapiens; identical to SEQ ID NO: 25797

SEQ ID NO: 51426 - DNA, 16 bp, Homo Sapiens
tccggctcgaaggacc

SEQ ID NO: 51427 - DNA, 17 bp, Homo Sapiens
tccggctcgaaggacca

SEQ ID NO: 51428 - DNA, 16 bp, Homo Sapiens
tccggctcggaggacc

SEQ ID NO: 51429 - DNA, 17 bp, Homo Sapiens
tccggctcggaggacca

SEQ ID NO: 51430 - DNA, 16 bp, Homo Sapiens
tccgggtgccccctcc

SEQ ID NO: 51431 - DNA, 17 bp, Homo Sapiens
tccgggtgccccctcca

SEQ ID NO: 51432 - DNA, 28 bp, Homo Sapiens
tccgggttcgagtcccggcggagtcgcc

SEQ ID NO: 51433 - DNA, 20 bp, Homo Sapiens
tccgtagtgtagtggtcatc

SEQ ID NO: 51434 - DNA, 29 bp, Homo Sapiens
tccgtagtgtagtggtcatcacgttcgcc

SEQ ID NO: 51435 - DNA, 30 bp, Homo Sapiens; identical to SEQ ID NO: 25831

SEQ ID NO: 51436 - DNA, 20 bp, Homo Sapiens
tccgtagtgtagtggttatc

SEQ ID NO: 51437 - DNA, 29 bp, Homo Sapiens
tccgtagtgtagtggttatcacgttcgcc

SEQ ID NO: 51438 - DNA, 30 bp, Homo Sapiens; identical to SEQ ID NO: 25843

SEQ ID NO: 51439 - DNA, 33 bp, Homo Sapiens; identical to SEQ ID NO: 25849

SEQ ID NO: 51440 - DNA, 33 bp, Homo Sapiens; identical to SEQ ID NO: 25866

SEQ ID NO: 51441 - DNA, 43 bp, Homo Sapiens; identical to SEQ ID NO: 25873

SEQ ID NO: 51442 - DNA, 44 bp, Homo Sapiens; identical to SEQ ID NO: 25874

SEQ ID NO: 51443 - DNA, 16 bp, Homo Sapiens
tcctcacacggggcac

SEQ ID NO: 51444 - DNA, 17 bp, Homo Sapiens
tcctcacacggggcacc

SEQ ID NO: 51445 - DNA, 18 bp, Homo Sapiens
tcctcacacggggcacca

SEQ ID NO: 51446 - DNA, 16 bp, Homo Sapiens
tcctcacctggagcac

SEQ ID NO: 51447 - DNA, 17 bp, Homo Sapiens
tcctcacctggagcacc

SEQ ID NO: 51448 - DNA, 18 bp, Homo Sapiens
tcctcacctggagcacca

SEQ ID NO: 51449 - DNA, 16 bp, Homo Sapiens
tcctcgctggggcctc

SEQ ID NO: 51450 - DNA, 16 bp, Homo Sapiens
tcctcgttagtatagt

SEQ ID NO: 51451 - DNA, 17 bp, Homo Sapiens
tcctcgttagtatagtg

SEQ ID NO: 51452 - DNA, 29 bp, Homo Sapiens
tcctcgttagtatagtggtgagtatcccc

SEQ ID NO: 51453 - DNA, 30 bp, Homo Sapiens; identical to SEQ ID NO: 25906

SEQ ID NO: 51454 - DNA, 32 bp, Homo Sapiens; identical to SEQ ID NO: 25908

SEQ ID NO: 51455 - DNA, 33 bp, Homo Sapiens; identical to SEQ ID NO: 25909

SEQ ID NO: 51456 - DNA, 34 bp, Homo Sapiens; identical to SEQ ID NO: 25910

SEQ ID NO: 51457 - DNA, 35 bp, Homo Sapiens; identical to SEQ ID NO: 25911

SEQ ID NO: 51458 - DNA, 36 bp, Homo Sapiens; identical to SEQ ID NO: 25912

SEQ ID NO: 51459 - DNA, 32 bp, Homo Sapiens; identical to SEQ ID NO: 25930

SEQ ID NO: 51460 - DNA, 33 bp, Homo Sapiens; identical to SEQ ID NO: 25931

SEQ ID NO: 51461 - DNA, 34 bp, Homo Sapiens; identical to SEQ ID NO: 25932

SEQ ID NO: 51462 - DNA, 35 bp, Homo Sapiens; identical to SEQ ID NO: 25933

SEQ ID NO: 51463 - DNA, 36 bp, Homo Sapiens; identical to SEQ ID NO: 25934

SEQ ID NO: 51464 - DNA, 16 bp, Homo Sapiens
tcctgccgactacgcc

SEQ ID NO: 51465 - DNA, 17 bp, Homo Sapiens
tcctgccgactacgcca

SEQ ID NO: 51466 - DNA, 16 bp, Homo Sapiens
tcctgccgcggtcgcc

SEQ ID NO: 51467 - DNA, 17 bp, Homo Sapiens
tcctgccgcggtcgcca

SEQ ID NO: 51468 - DNA, 16 bp, Homo Sapiens
tcctgctcacagcgcc

SEQ ID NO: 51469 - DNA, 17 bp, Homo Sapiens
tcctgctcacagcgcca

SEQ ID NO: 51470 - DNA, 16 bp, Homo Sapiens
tcctggctggctcgcc

SEQ ID NO: 51471 - DNA, 17 bp, Homo Sapiens
tcctggctggctcgcca

SEQ ID NO: 51472 - DNA, 29 bp, Homo Sapiens
tcctgggttcgagccccagtggaaccacc

SEQ ID NO: 51473 - DNA, 47 bp, Homo Sapiens; identical to SEQ ID NO: 41283

SEQ ID NO: 51474 - DNA, 16 bp, Homo Sapiens
tcctgtcggctacgcc

SEQ ID NO: 51475 - DNA, 17 bp, Homo Sapiens
tcctgtcggctacgcca

SEQ ID NO: 51476 - DNA, 16 bp, Homo Sapiens
tcctgttcgtgacgcc

SEQ ID NO: 51477 - DNA, 17 bp, Homo Sapiens
tcctgttcgtgacgcca

SEQ ID NO: 51478 - DNA, 36 bp, Homo Sapiens
tccttaggtcgctggttcgaatccggctcgaaggac

SEQ ID NO: 51479 - DNA, 18 bp, Homo Sapiens
tcgaaaccatcctctgct

SEQ ID NO: 51480 - DNA, 21 bp, Homo Sapiens
tcgaaaccatcctctgctacc

SEQ ID NO: 51481 - DNA, 22 bp, Homo Sapiens
tcgaaaccatcctctgctacca

SEQ ID NO: 51482 - DNA, 21 bp, Homo Sapiens
tcgaaaccgggcagaagcacc

SEQ ID NO: 51483 - DNA, 22 bp, Homo Sapiens
tcgaaaccgggcagaagcacca

SEQ ID NO: 51484 - DNA, 16 bp, Homo Sapiens
tcgaaaccgggcggaa

SEQ ID NO: 51485 - DNA, 17 bp, Homo Sapiens
tcgaaaccgggcggaaa

SEQ ID NO: 51486 - DNA, 18 bp, Homo Sapiens
tcgaaaccgggcggaaac

SEQ ID NO: 51487 - DNA, 19 bp, Homo Sapiens
tcgaaaccgggcggaaaca

SEQ ID NO: 51488 - DNA, 20 bp, Homo Sapiens
tcgaaaccgggcggaaacac

SEQ ID NO: 51489 - DNA, 21 bp, Homo Sapiens
tcgaaaccgggcggaaacacc

SEQ ID NO: 51490 - DNA, 22 bp, Homo Sapiens
tcgaaaccgggcggaaacacca

SEQ ID NO: 51491 - DNA, 23 bp, Homo Sapiens
tcgaaatccaatggggtttcccc

SEQ ID NO: 51492 - DNA, 21 bp, Homo Sapiens
tcgaaccccactcctggtacc

SEQ ID NO: 51493 - DNA, 19 bp, Homo Sapiens
tcgaaccccgtccgtgcct

SEQ ID NO: 51494 - DNA, 20 bp, Homo Sapiens
tcgaaccccgtccgtgcctc

SEQ ID NO: 51495 - DNA, 21 bp, Homo Sapiens
tcgaaccctgctcgctgcgcc

SEQ ID NO: 51496 - DNA, 22 bp, Homo Sapiens
tcgaaccctgctcgctgcgcca

SEQ ID NO: 51497 - DNA, 18 bp, Homo Sapiens
tcgaacctcagagggggc

SEQ ID NO: 51498 - DNA, 22 bp, Homo Sapiens
tcgaacctcagagggggcacca

SEQ ID NO: 51499 - DNA, 23 bp, Homo Sapiens
tcgaagaagcagcttcaaacctg

SEQ ID NO: 51500 - DNA, 28 bp, Homo Sapiens
tcgaagaagcagcttcaaacctgccggg

SEQ ID NO: 51501 - DNA, 29 bp, Homo Sapiens
tcgaagaagcagcttcaaacctgccgggg

SEQ ID NO: 51502 - DNA, 30 bp, Homo Sapiens; identical to SEQ ID NO: 26039

SEQ ID NO: 51503 - DNA, 31 bp, Homo Sapiens; identical to SEQ ID NO: 26040

SEQ ID NO: 51504 - DNA, 32 bp, Homo Sapiens; identical to SEQ ID NO: 26041

SEQ ID NO: 51505 - DNA, 33 bp, Homo Sapiens; identical to SEQ ID NO: 26042

SEQ ID NO: 51506 - DNA, 34 bp, Homo Sapiens; identical to SEQ ID NO: 26043

SEQ ID NO: 51507 - DNA, 35 bp, Homo Sapiens; identical to SEQ ID NO: 26044

SEQ ID NO: 51508 - DNA, 16 bp, Homo Sapiens
tcgaatcacgtcgggg

SEQ ID NO: 51509 - DNA, 20 bp, Homo Sapiens
tcgaatcacgtcggggtcac

SEQ ID NO: 51510 - DNA, 21 bp, Homo Sapiens
tcgaatcacgtcggggtcacc

SEQ ID NO: 51511 - DNA, 22 bp, Homo Sapiens
tcgaatcacgtcggggtcacca

SEQ ID NO: 51512 - DNA, 18 bp, Homo Sapiens
tcgaatcccaccgctgcc

SEQ ID NO: 51513 - DNA, 21 bp, Homo Sapiens
tcgaatcccaccgctgccacc

SEQ ID NO: 51514 - DNA, 22 bp, Homo Sapiens
tcgaatcccaccgctgccacca

SEQ ID NO: 51515 - DNA, 20 bp, Homo Sapiens
tcgaatcccactcctgacac

SEQ ID NO: 51516 - DNA, 21 bp, Homo Sapiens
tcgaatcccactcctgacacc

SEQ ID NO: 51517 - DNA, 22 bp, Homo Sapiens
tcgaatcccactcctgacacca

SEQ ID NO: 51518 - DNA, 19 bp, Homo Sapiens
tcgaatcccacttctgaca

SEQ ID NO: 51519 - DNA, 21 bp, Homo Sapiens
tcgaatcccacttctgacacc

SEQ ID NO: 51520 - DNA, 22 bp, Homo Sapiens
tcgaatcccacttctgacacca

SEQ ID NO: 51521 - DNA, 19 bp, Homo Sapiens
tcgaatcccagcggggcct

SEQ ID NO: 51522 - DNA, 20 bp, Homo Sapiens
tcgaatcccagcggggcctc

SEQ ID NO: 51523 - DNA, 22 bp, Homo Sapiens
tcgaatcccagcggggcctcca

SEQ ID NO: 51524 - DNA, 16 bp, Homo Sapiens
tcgaatcccagcggtg

SEQ ID NO: 51525 - DNA, 19 bp, Homo Sapiens
tcgaatcccagcggtgcct

SEQ ID NO: 51526 - DNA, 20 bp, Homo Sapiens
tcgaatcccagcggtgcctc

SEQ ID NO: 51527 - DNA, 21 bp, Homo Sapiens
tcgaatcccagcggtgcctcc

SEQ ID NO: 51528 - DNA, 22 bp, Homo Sapiens
tcgaatcccagcggtgcctcca

SEQ ID NO: 51529 - DNA, 19 bp, Homo Sapiens
tcgaatcccatcctcgtcg

SEQ ID NO: 51530 - DNA, 20 bp, Homo Sapiens
tcgaatcccatcctcgtcgc

SEQ ID NO: 51531 - DNA, 21 bp, Homo Sapiens
tcgaatcccatcctcgtcgcc

SEQ ID NO: 51532 - DNA, 22 bp, Homo Sapiens
tcgaatcccatcctcgtcgcca

SEQ ID NO: 51533 - DNA, 18 bp, Homo Sapiens
tcgaatccgagtcacggc

SEQ ID NO: 51534 - DNA, 19 bp, Homo Sapiens
tcgaatccgagtcacggca

SEQ ID NO: 51535 - DNA, 20 bp, Homo Sapiens
tcgaatccgagtcacggcac

SEQ ID NO: 51536 - DNA, 21 bp, Homo Sapiens
tcgaatccgagtcacggcacc

SEQ ID NO: 51537 - DNA, 22 bp, Homo Sapiens
tcgaatccgagtcacggcacca

SEQ ID NO: 51538 - DNA, 20 bp, Homo Sapiens
tcgaatccggctcgaaggac

SEQ ID NO: 51539 - DNA, 21 bp, Homo Sapiens
tcgaatccggctcgaaggacc

SEQ ID NO: 51540 - DNA, 22 bp, Homo Sapiens
tcgaatccggctcgaaggacca

SEQ ID NO: 51541 - DNA, 21 bp, Homo Sapiens
tcgaatccggctcggaggacc

SEQ ID NO: 51542 - DNA, 21 bp, Homo Sapiens
tcgaatcctgccgactacgcc

SEQ ID NO: 51543 - DNA, 22 bp, Homo Sapiens
tcgaatcctgccgactacgcca

SEQ ID NO: 51544 - DNA, 21 bp, Homo Sapiens
tcgaatcctgctcacagcgcc

SEQ ID NO: 51545 - DNA, 22 bp, Homo Sapiens
tcgaatcctgctcacagcgcca

SEQ ID NO: 51546 - DNA, 22 bp, Homo Sapiens
tcgaatcctgtcggctacgcca

SEQ ID NO: 51547 - DNA, 21 bp, Homo Sapiens
tcgaatcctgttcgtgacgcc

SEQ ID NO: 51548 - DNA, 20 bp, Homo Sapiens
tcgactcccggtatgggaac

SEQ ID NO: 51549 - DNA, 17 bp, Homo Sapiens
tcgactcccggtgtggg

SEQ ID NO: 51550 - DNA, 18 bp, Homo Sapiens
tcgactcccggtgtggga

SEQ ID NO: 51551 - DNA, 19 bp, Homo Sapiens
tcgactcccggtgtgggaa

SEQ ID NO: 51552 - DNA, 20 bp, Homo Sapiens
tcgactcccggtgtgggaac

SEQ ID NO: 51553 - DNA, 21 bp, Homo Sapiens
tcgactcccggtgtgggaacc

SEQ ID NO: 51554 - DNA, 22 bp, Homo Sapiens
tcgactcccggtgtgggaacca

SEQ ID NO: 51555 - DNA, 16 bp, Homo Sapiens
tcgactcctggctggc

SEQ ID NO: 51556 - DNA, 17 bp, Homo Sapiens
tcgactcctggctggct

SEQ ID NO: 51557 - DNA, 19 bp, Homo Sapiens
tcgactcctggctggctcg

SEQ ID NO: 51558 - DNA, 20 bp, Homo Sapiens
tcgactcctggctggctcgc

SEQ ID NO: 51559 - DNA, 21 bp, Homo Sapiens
tcgactcctggctggctcgcc

SEQ ID NO: 51560 - DNA, 22 bp, Homo Sapiens
tcgactcctggctggctcgcca

SEQ ID NO: 51561 - DNA, 21 bp, Homo Sapiens
tcgagcccacccagggacgcc

SEQ ID NO: 51562 - DNA, 22 bp, Homo Sapiens
tcgagccccacgttgggcgcca

SEQ ID NO: 51563 - DNA, 17 bp, Homo Sapiens
tcgagccccagtggaac

SEQ ID NO: 51564 - DNA, 18 bp, Homo Sapiens
tcgagccccagtggaacc

SEQ ID NO: 51565 - DNA, 20 bp, Homo Sapiens
tcgagccccagtggaaccac

SEQ ID NO: 51566 - DNA, 21 bp, Homo Sapiens
tcgagccccagtggaaccacc

SEQ ID NO: 51567 - DNA, 22 bp, Homo Sapiens
tcgagccccagtggaaccacca

SEQ ID NO: 51568 - DNA, 21 bp, Homo Sapiens
tcgagcctcacctggagcacc

SEQ ID NO: 51569 - DNA, 21 bp, Homo Sapiens
tcgagtcccacctggggtacc

SEQ ID NO: 51570 - DNA, 19 bp, Homo Sapiens
tcgagtcccatctggggtg

SEQ ID NO: 51571 - DNA, 21 bp, Homo Sapiens
tcgagtcccatctggggtgcc

SEQ ID NO: 51572 - DNA, 21 bp, Homo Sapiens
tcgagtcccatctgggtcgcc

SEQ ID NO: 51573 - DNA, 22 bp, Homo Sapiens
tcgagtcccatctgggtcgcca

SEQ ID NO: 51574 - DNA, 20 bp, Homo Sapiens
tcgagtcccggcggagtcgc

SEQ ID NO: 51575 - DNA, 21 bp, Homo Sapiens
tcgagtcccggcggagtcgcc

SEQ ID NO: 51576 - DNA, 22 bp, Homo Sapiens
tcgagtcccggcggagtcgcca

SEQ ID NO: 51577 - DNA, 21 bp, Homo Sapiens
tcgagtcccttcgtggtcgcc

SEQ ID NO: 51578 - DNA, 22 bp, Homo Sapiens
tcgagtcccttcgtggtcgcca

SEQ ID NO: 51579 - DNA, 20 bp, Homo Sapiens
tcgagtcctgccgcggtcgc

SEQ ID NO: 51580 - DNA, 21 bp, Homo Sapiens
tcgagtcctgccgcggtcgcc

SEQ ID NO: 51581 - DNA, 19 bp, Homo Sapiens
tcgagtctcggtggaacct

SEQ ID NO: 51582 - DNA, 19 bp, Homo Sapiens
tcgatagagcatgagactc

SEQ ID NO: 51583 - DNA, 22 bp, Homo Sapiens
tcgatccccagcatctccacca

SEQ ID NO: 51584 - DNA, 21 bp, Homo Sapiens
tcgatccccggcacctccacc

SEQ ID NO: 51585 - DNA, 21 bp, Homo Sapiens
tcgatccccggcatctccacc

SEQ ID NO: 51586 - DNA, 22 bp, Homo Sapiens
tcgatccccggcatctccacca

SEQ ID NO: 51587 - DNA, 18 bp, Homo Sapiens
tcgatccccgtacgggcc

SEQ ID NO: 51588 - DNA, 21 bp, Homo Sapiens
tcgatccccgtacgggccacc

SEQ ID NO: 51589 - DNA, 22 bp, Homo Sapiens
tcgatccccgtacgggccacca

SEQ ID NO: 51590 - DNA, 21 bp, Homo Sapiens
tcgatcccgggcggaaacacc

SEQ ID NO: 51591 - DNA, 20 bp, Homo Sapiens
tcgatcccgggtttcggcac

SEQ ID NO: 51592 - DNA, 22 bp, Homo Sapiens
tcgatcccgggtttcggcacca

SEQ ID NO: 51593 - DNA, 21 bp, Homo Sapiens
tcgatcctcacacggggcacc

SEQ ID NO: 51594 - DNA, 21 bp, Homo Sapiens
tcgatcctcacctggagcacc

SEQ ID NO: 51595 - DNA, 21 bp, Homo Sapiens
tcgatgcccgcatcctccacc

SEQ ID NO: 51596 - DNA, 22 bp, Homo Sapiens
tcgatgcccgcatcctccacca

SEQ ID NO: 51597 - DNA, 16 bp, Homo Sapiens
tcgatggatcgaaacc

SEQ ID NO: 51598 - DNA, 29 bp, Homo Sapiens
tcgatggatcgaaaccatcctctgctacc

SEQ ID NO: 51599 - DNA, 16 bp, Homo Sapiens
tcgatggcgtgggttc

SEQ ID NO: 51600 - DNA, 17 bp, Homo Sapiens
tcgatggcgtgggttcg

SEQ ID NO: 51601 - DNA, 26 bp, Homo Sapiens
tcgatggcgtgggttcgaatcccacc

SEQ ID NO: 51602 - DNA, 30 bp, Homo Sapiens; identical to SEQ ID NO: 26211

SEQ ID NO: 51603 - DNA, 22 bp, Homo Sapiens
tcgattccagctcgaaggacca

SEQ ID NO: 51604 - DNA, 16 bp, Homo Sapiens
tcgattccccgacggg

SEQ ID NO: 51605 - DNA, 17 bp, Homo Sapiens
tcgattccccgacgggg

SEQ ID NO: 51606 - DNA, 18 bp, Homo Sapiens
tcgattccccgacgggga

SEQ ID NO: 51607 - DNA, 19 bp, Homo Sapiens
tcgattccccgacggggag

SEQ ID NO: 51608 - DNA, 20 bp, Homo Sapiens
tcgattccccgacggggagc

SEQ ID NO: 51609 - DNA, 21 bp, Homo Sapiens
tcgattccccgacggggagcc

SEQ ID NO: 51610 - DNA, 22 bp, Homo Sapiens
tcgattccccgacggggagcca

SEQ ID NO: 51611 - DNA, 17 bp, Homo Sapiens
tcgattcccggccaacg

SEQ ID NO: 51612 - DNA, 20 bp, Homo Sapiens
tcgattcccggccaacgcac

SEQ ID NO: 51613 - DNA, 21 bp, Homo Sapiens
tcgattcccggccaacgcacc

SEQ ID NO: 51614 - DNA, 22 bp, Homo Sapiens
tcgattcccggccaacgcacca

SEQ ID NO: 51615 - DNA, 19 bp, Homo Sapiens
tcgattcccggccaatgca

SEQ ID NO: 51616 - DNA, 20 bp, Homo Sapiens
tcgattcccggccaatgcac

SEQ ID NO: 51617 - DNA, 21 bp, Homo Sapiens
tcgattcccggccaatgcacc

SEQ ID NO: 51618 - DNA, 22 bp, Homo Sapiens
tcgattcccggccaatgcacca

SEQ ID NO: 51619 - DNA, 21 bp, Homo Sapiens
tcgattcccggcccatgcacc

SEQ ID NO: 51620 - DNA, 22 bp, Homo Sapiens
tcgattcccggcccatgcacca

SEQ ID NO: 51621 - DNA, 16 bp, Homo Sapiens
tcgattcccgggcggc

SEQ ID NO: 51622 - DNA, 17 bp, Homo Sapiens
tcgattcccgggcggcg

SEQ ID NO: 51623 - DNA, 19 bp, Homo Sapiens
tcgattcccgggcggcgca

SEQ ID NO: 51624 - DNA, 20 bp, Homo Sapiens
tcgattcccgggcggcgcac

SEQ ID NO: 51625 - DNA, 21 bp, Homo Sapiens
tcgattcccgggcggcgcacc

SEQ ID NO: 51626 - DNA, 22 bp, Homo Sapiens
tcgattcccgggcggcgcacca

SEQ ID NO: 51627 - DNA, 16 bp, Homo Sapiens
tcgattcccggtcagg

SEQ ID NO: 51628 - DNA, 21 bp, Homo Sapiens
tcgattcccggtcagggaacc

SEQ ID NO: 51629 - DNA, 20 bp, Homo Sapiens
tcgattccggctcgaaggac

SEQ ID NO: 51630 - DNA, 21 bp, Homo Sapiens
tcgattccggctcgaaggacc

SEQ ID NO: 51631 - DNA, 22 bp, Homo Sapiens
tcgattccggctcgaaggacca

SEQ ID NO: 51632 - DNA, 16 bp, Homo Sapiens
tcgattctcatagtcc

SEQ ID NO: 51633 - DNA, 17 bp, Homo Sapiens
tcgattctcatagtcct

SEQ ID NO: 51634 - DNA, 19 bp, Homo Sapiens
tcgattctcatagtcctag

SEQ ID NO: 51635 - DNA, 20 bp, Homo Sapiens
tcgattctcatagtcctagc

SEQ ID NO: 51636 - DNA, 21 bp, Homo Sapiens
tcgattctcatagtcctagcc

SEQ ID NO: 51637 - DNA, 22 bp, Homo Sapiens
tcgattctcatagtcctagcca

SEQ ID NO: 51638 - DNA, 22 bp, Homo Sapiens
tcgcctgccacgcgggaggccc

SEQ ID NO: 51639 - DNA, 26 bp, Homo Sapiens
tcgcctgccacgcgggaggcccgggt

SEQ ID NO: 51640 - DNA, 28 bp, Homo Sapiens
tcgcgagttcaattctcgctggggcctc

SEQ ID NO: 51641 - DNA, 25 bp, Homo Sapiens
tcgcgggttcgatccccgtacgggc

SEQ ID NO: 51642 - DNA, 26 bp, Homo Sapiens
tcgcgggttcgatccccgtacgggcc

SEQ ID NO: 51643 - DNA, 27 bp, Homo Sapiens
tcgcgggttcgatccccgtacgggcca

SEQ ID NO: 51644 - DNA, 28 bp, Homo Sapiens
tcgcgggttcgatccccgtacgggccac

SEQ ID NO: 51645 - DNA, 29 bp, Homo Sapiens
tcgcgggttcgatccccgtacgggccacc

SEQ ID NO: 51646 - DNA, 30 bp, Homo Sapiens; identical to SEQ ID NO: 26297

SEQ ID NO: 51647 - DNA, 28 bp, Homo Sapiens
tcgctggttcgaatccggctcgaaggac

SEQ ID NO: 51648 - DNA, 29 bp, Homo Sapiens
tcgctggttcgaatccggctcgaaggacc

SEQ ID NO: 51649 - DNA, 30 bp, Homo Sapiens; identical to SEQ ID NO: 26303

SEQ ID NO: 51650 - DNA, 29 bp, Homo Sapiens
tcgctggttcgaatccggctcggaggacc

SEQ ID NO: 51651 - DNA, 30 bp, Homo Sapiens; identical to SEQ ID NO: 26307

SEQ ID NO: 51652 - DNA, 30 bp, Homo Sapiens
tcgctggttcgattccagctcgaaggacca

SEQ ID NO: 51653 - DNA, 28 bp, Homo Sapiens
tcgctggttcgattccggctcgaaggac

SEQ ID NO: 51654 - DNA, 29 bp, Homo Sapiens
tcgctggttcgattccggctcgaaggacc

SEQ ID NO: 51655 - DNA, 30 bp, Homo Sapiens; identical to SEQ ID NO: 26315

SEQ ID NO: 51656 - DNA, 24 bp, Homo Sapiens
tcggaggcgtgggttcgaatccca

SEQ ID NO: 51657 - DNA, 41 bp, Homo Sapiens; identical to SEQ ID NO: 26329

SEQ ID NO: 51658 - DNA, 17 bp, Homo Sapiens
tcggcgctctcaccgcc

SEQ ID NO: 51659 - DNA, 24 bp, Homo Sapiens
tcggcgctctcaccgccgcggccc

SEQ ID NO: 51660 - DNA, 47 bp, Homo Sapiens; identical to SEQ ID NO: 41496

SEQ ID NO: 51661 - DNA, 18 bp, Homo Sapiens
tcggctagcgcgtttggc

SEQ ID NO: 51662 - DNA, 27 bp, Homo Sapiens
tcggctgttaaccgaaaggttggtggt

SEQ ID NO: 51663 - DNA, 38 bp, Homo Sapiens
tcggctgttaaccgaaaggttggtggttcgagcccacc

SEQ ID NO: 51664 - DNA, 39 bp, Homo Sapiens
tcggctgttaaccgaaaggttggtggttcgagcccaccc

SEQ ID NO: 51665 - DNA, 47 bp, Homo Sapiens; identical to SEQ ID NO: 41500

SEQ ID NO: 51666 - DNA, 16 bp, Homo Sapiens
tcggctgttaaccgga

SEQ ID NO: 51667 - DNA, 16 bp, Homo Sapiens
tcgggcccataccccg

SEQ ID NO: 51668 - DNA, 19 bp, Homo Sapiens
tcgggcccataccccgaaa

SEQ ID NO: 51669 - DNA, 18 bp, Homo Sapiens
tcgggtgcgagaggtccc

SEQ ID NO: 51670 - DNA, 19 bp, Homo Sapiens
tcgggtgcgagaggtcccg

SEQ ID NO: 51671 - DNA, 22 bp, Homo Sapiens
tcgggtgcgagaggtcccgggt

SEQ ID NO: 51672 - DNA, 23 bp, Homo Sapiens
tcgggtgcgagaggtcccgggtt

SEQ ID NO: 51673 - DNA, 34 bp, Homo Sapiens
tcgggtgcgagaggtcccgggttcaaatcccgga

SEQ ID NO: 51674 - DNA, 17 bp, Homo Sapiens
tcggtagagcatcagac

SEQ ID NO: 51675 - DNA, 18 bp, Homo Sapiens
tcggtagagcatcagact

SEQ ID NO: 51676 - DNA, 16 bp, Homo Sapiens
tcggtagagcatgaga

SEQ ID NO: 51677 - DNA, 17 bp, Homo Sapiens
tcggtagagcatgagac

SEQ ID NO: 51678 - DNA, 18 bp, Homo Sapiens
tcggtagagcatgagacc

SEQ ID NO: 51679 - DNA, 19 bp, Homo Sapiens
tcggtagagcatgagaccc

SEQ ID NO: 51680 - DNA, 25 bp, Homo Sapiens
tcggtagagcatgagacccttaatc

SEQ ID NO: 51681 - DNA, 18 bp, Homo Sapiens
tcggtagagcatgagact

SEQ ID NO: 51682 - DNA, 19 bp, Homo Sapiens
tcggtagagcatgagactc

SEQ ID NO: 51683 - DNA, 20 bp, Homo Sapiens
tcggtagagcatgagactct

SEQ ID NO: 51684 - DNA, 25 bp, Homo Sapiens
tcggtagagcatgagactcttaatc

SEQ ID NO: 51685 - DNA, 26 bp, Homo Sapiens
tcggtagagcatgagactcttaatct

SEQ ID NO: 51686 - DNA, 27 bp, Homo Sapiens
tcggtagagcatgagactcttaatctc

SEQ ID NO: 51687 - DNA, 37 bp, Homo Sapiens; identical to SEQ ID NO: 26409

SEQ ID NO: 51688 - DNA, 40 bp, Homo Sapiens; identical to SEQ ID NO: 26412

SEQ ID NO: 51689 - DNA, 16 bp, Homo Sapiens
tcggtagagcatggga

SEQ ID NO: 51690 - DNA, 17 bp, Homo Sapiens
tcggtagagcatgggac

SEQ ID NO: 51691 - DNA, 18 bp, Homo Sapiens
tcggtagagcatgggact

SEQ ID NO: 51692 - DNA, 19 bp, Homo Sapiens
tcggtagagcatgggactc

SEQ ID NO: 51693 - DNA, 20 bp, Homo Sapiens
tcggtagagcatgggactct

SEQ ID NO: 51694 - DNA, 24 bp, Homo Sapiens
tcggtagagcatgggactcttaat

SEQ ID NO: 51695 - DNA, 25 bp, Homo Sapiens
tcggtagagcatgggactcttaatc

SEQ ID NO: 51696 - DNA, 26 bp, Homo Sapiens
tcggtagagcatgggactcttaatcc

SEQ ID NO: 51697 - DNA, 27 bp, Homo Sapiens
tcggtagagcatgggactcttaatccc

SEQ ID NO: 51698 - DNA, 37 bp, Homo Sapiens; identical to SEQ ID NO: 26429

SEQ ID NO: 51699 - DNA, 38 bp, Homo Sapiens; identical to SEQ ID NO: 26430

SEQ ID NO: 51700 - DNA, 40 bp, Homo Sapiens; identical to SEQ ID NO: 26432

SEQ ID NO: 51701 - DNA, 24 bp, Homo Sapiens
tcggttcgaatccgagtcacggca

SEQ ID NO: 51702 - DNA, 25 bp, Homo Sapiens
tcggttcgaatccgagtcacggcac

SEQ ID NO: 51703 - DNA, 22 bp, Homo Sapiens
tcgtaaaccgaagatcacgggt

SEQ ID NO: 51704 - DNA, 20 bp, Homo Sapiens
tcgtaaaccgaagatcgcgg

SEQ ID NO: 51705 - DNA, 21 bp, Homo Sapiens
tcgtaaaccgaagatcgcggg

SEQ ID NO: 51706 - DNA, 22 bp, Homo Sapiens
tcgtaaaccgaagatcgcgggt

SEQ ID NO: 51707 - DNA, 18 bp, Homo Sapiens
tcgtatagtggttagtac

SEQ ID NO: 51708 - DNA, 19 bp, Homo Sapiens
tcgtatagtggttagtact

SEQ ID NO: 51709 - DNA, 20 bp, Homo Sapiens
tcgtatagtggttagtactc

SEQ ID NO: 51710 - DNA, 21 bp, Homo Sapiens
tcgtatagtggttagtactct

SEQ ID NO: 51711 - DNA, 22 bp, Homo Sapiens
tcgtatagtggttagtactctg

SEQ ID NO: 51712 - DNA, 23 bp, Homo Sapiens
tcgtatagtggttagtactctgc

SEQ ID NO: 51713 - DNA, 24 bp, Homo Sapiens
tcgtatagtggttagtactctgcg

SEQ ID NO: 51714 - DNA, 25 bp, Homo Sapiens
tcgtatagtggttagtactctgcgt

SEQ ID NO: 51715 - DNA, 26 bp, Homo Sapiens
tcgtatagtggttagtactctgcgtt

SEQ ID NO: 51716 - DNA, 32 bp, Homo Sapiens; identical to SEQ ID NO: 26476

SEQ ID NO: 51717 - DNA, 41 bp, Homo Sapiens; identical to SEQ ID NO: 26478

SEQ ID NO: 51718 - DNA, 42 bp, Homo Sapiens; identical to SEQ ID NO: 26479

SEQ ID NO: 51719 - DNA, 46 bp, Homo Sapiens; identical to SEQ ID NO: 26482

SEQ ID NO: 51720 - DNA, 19 bp, Homo Sapiens
tcgtggccgagtggttaag

SEQ ID NO: 51721 - DNA, 26 bp, Homo Sapiens
tcgtgggttcgagccccacgttgggc

SEQ ID NO: 51722 - DNA, 27 bp, Homo Sapiens
tcgtgggttcgagccccacgttgggcg

SEQ ID NO: 51723 - DNA, 28 bp, Homo Sapiens
tcgtgggttcgagccccacgttgggcgc

SEQ ID NO: 51724 - DNA, 29 bp, Homo Sapiens
tcgtgggttcgagccccacgttgggcgcc

SEQ ID NO: 51725 - DNA, 30 bp, Homo Sapiens; identical to SEQ ID NO: 26498

SEQ ID NO: 51726 - DNA, 19 bp, Homo Sapiens
tcgtggttgtagtccgtgc

SEQ ID NO: 51727 - DNA, 20 bp, Homo Sapiens
tcgtggttgtagtccgtgcg

SEQ ID NO: 51728 - DNA, 23 bp, Homo Sapiens
tcgtggttgtagtccgtgcgaga

SEQ ID NO: 51729 - DNA, 24 bp, Homo Sapiens
tcgtggttgtagtccgtgcgagaa

SEQ ID NO: 51730 - DNA, 25 bp, Homo Sapiens
tcgtggttgtagtccgtgcgagaat

SEQ ID NO: 51731 - DNA, 26 bp, Homo Sapiens
tcgtggttgtagtccgtgcgagaata

SEQ ID NO: 51732 - DNA, 27 bp, Homo Sapiens
tcgtggttgtagtccgtgcgagaatac

SEQ ID NO: 51733 - DNA, 28 bp, Homo Sapiens
tcgtggttgtagtccgtgcgagaatacc

SEQ ID NO: 51734 - DNA, 29 bp, Homo Sapiens
tcgtggttgtagtccgtgcgagaatacca

SEQ ID NO: 51735 - DNA, 30 bp, Homo Sapiens; identical to SEQ ID NO: 26522

SEQ ID NO: 51736 - DNA, 27 bp, Homo Sapiens
tcgttggtctaggggtatgattctcgc

SEQ ID NO: 51737 - DNA, 28 bp, Homo Sapiens
tcgttggtctaggggtatgattctcgct

SEQ ID NO: 51738 - DNA, 35 bp, Homo Sapiens; identical to SEQ ID NO: 26559

SEQ ID NO: 51739 - DNA, 36 bp, Homo Sapiens; identical to SEQ ID NO: 41589

SEQ ID NO: 51740 - DNA, 37 bp, Homo Sapiens; identical to SEQ ID NO: 26560

SEQ ID NO: 51741 - DNA, 19 bp, Homo Sapiens
tctaaaggtccctggttcg

SEQ ID NO: 51742 - DNA, 33 bp, Homo Sapiens; identical to SEQ ID NO: 41591

SEQ ID NO: 51743 - DNA, 34 bp, Homo Sapiens; identical to SEQ ID NO: 41592

SEQ ID NO: 51744 - DNA, 35 bp, Homo Sapiens; identical to SEQ ID NO: 26564

SEQ ID NO: 51745 - DNA, 36 bp, Homo Sapiens; identical to SEQ ID NO: 26565

SEQ ID NO: 51746 - DNA, 37 bp, Homo Sapiens; identical to SEQ ID NO: 26566

SEQ ID NO: 51747 - DNA, 38 bp, Homo Sapiens; identical to SEQ ID NO: 26567

SEQ ID NO: 51748 - DNA, 20 bp, Homo Sapiens
tctaacaacatggctttctc

SEQ ID NO: 51749 - DNA, 23 bp, Homo Sapiens
tctaacaacatggctttctcacc

SEQ ID NO: 51750 - DNA, 24 bp, Homo Sapiens
tctaacaacatggctttctcacca

SEQ ID NO: 51751 - DNA, 17 bp, Homo Sapiens
tctagcggttaggattc

SEQ ID NO: 51752 - DNA, 18 bp, Homo Sapiens
tctagcggttaggattcc

SEQ ID NO: 51753 - DNA, 19 bp, Homo Sapiens
tctagcggttaggattcct

SEQ ID NO: 51754 - DNA, 21 bp, Homo Sapiens
tctagcggttaggattcctgg

SEQ ID NO: 51755 - DNA, 22 bp, Homo Sapiens
tctagcggttaggattcctggt

SEQ ID NO: 51756 - DNA, 23 bp, Homo Sapiens
tctagcggttaggattcctggtt

SEQ ID NO: 51757 - DNA, 26 bp, Homo Sapiens
tctagcggttaggattcctggttttc

SEQ ID NO: 51758 - DNA, 32 bp, Homo Sapiens
tctagcggttaggattcctggttttcacccag

SEQ ID NO: 51759 - DNA, 18 bp, Homo Sapiens
tctaggggtatgattctc

SEQ ID NO: 51760 - DNA, 21 bp, Homo Sapiens
tctaggggtatgattctcgct

SEQ ID NO: 51761 - DNA, 22 bp, Homo Sapiens
tctaggggtatgattctcgctt

SEQ ID NO: 51762 - DNA, 27 bp, Homo Sapiens
tctaggttcgactcctggctggctcgc

SEQ ID NO: 51763 - DNA, 28 bp, Homo Sapiens
tctaggttcgactcctggctggctcgcc

SEQ ID NO: 51764 - DNA, 18 bp, Homo Sapiens
tctagtggtatgattctc

SEQ ID NO: 51765 - DNA, 20 bp, Homo Sapiens
tctagtggttaggattcggc

SEQ ID NO: 51766 - DNA, 21 bp, Homo Sapiens
tctagtggttaggattcggcg

SEQ ID NO: 51767 - DNA, 22 bp, Homo Sapiens
tctagtggttaggattcggcgc

SEQ ID NO: 51768 - DNA, 23 bp, Homo Sapiens
tctagtggttaggattcggcgct

SEQ ID NO: 51769 - DNA, 25 bp, Homo Sapiens
tctagtggttaggattcggcgctct

SEQ ID NO: 51770 - DNA, 29 bp, Homo Sapiens
tctagtggttaggattcggcgctctcacc

SEQ ID NO: 51771 - DNA, 31 bp, Homo Sapiens; identical to SEQ ID NO: 26642

SEQ ID NO: 51772 - DNA, 32 bp, Homo Sapiens; identical to SEQ ID NO: 26643

SEQ ID NO: 51773 - DNA, 39 bp, Homo Sapiens; identical to SEQ ID NO: 26644

SEQ ID NO: 51774 - DNA, 17 bp, Homo Sapiens
tctcaccgccgcggccc

SEQ ID NO: 51775 - DNA, 23 bp, Homo Sapiens
tctcaccgccgcggcccgggttc

SEQ ID NO: 51776 - DNA, 40 bp, Homo Sapiens; identical to SEQ ID NO: 26665

SEQ ID NO: 51777 - DNA, 41 bp, Homo Sapiens; identical to SEQ ID NO: 26666

SEQ ID NO: 51778 - DNA, 42 bp, Homo Sapiens; identical to SEQ ID NO: 26667

SEQ ID NO: 51779 - DNA, 43 bp, Homo Sapiens; identical to SEQ ID NO: 26668

SEQ ID NO: 51780 - DNA, 25 bp, Homo Sapiens
tctcagggatgggttcgattctcat

SEQ ID NO: 51781 - DNA, 30 bp, Homo Sapiens; identical to SEQ ID NO: 26673

SEQ ID NO: 51782 - DNA, 31 bp, Homo Sapiens; identical to SEQ ID NO: 26674

SEQ ID NO: 51783 - DNA, 34 bp, Homo Sapiens; identical to SEQ ID NO: 26677

SEQ ID NO: 51784 - DNA, 36 bp, Homo Sapiens; identical to SEQ ID NO: 26685

SEQ ID NO: 51785 - DNA, 37 bp, Homo Sapiens; identical to SEQ ID NO: 26686

SEQ ID NO: 51786 - DNA, 38 bp, Homo Sapiens; identical to SEQ ID NO: 26687

SEQ ID NO: 51787 - DNA, 19 bp, Homo Sapiens
tctcataatctgaaggtcg

SEQ ID NO: 51788 - DNA, 16 bp, Homo Sapiens
tctcatagtcctagcc

SEQ ID NO: 51789 - DNA, 21 bp, Homo Sapiens
tctccggatggaggcgtgggt

SEQ ID NO: 51790 - DNA, 41 bp, Homo Sapiens; identical to SEQ ID NO: 26727

SEQ ID NO: 51791 - DNA, 42 bp, Homo Sapiens; identical to SEQ ID NO: 26728

SEQ ID NO: 51792 - DNA, 26 bp, Homo Sapiens
tctcgcctcccacgcgggagacccgg

SEQ ID NO: 51793 - DNA, 24 bp, Homo Sapiens
tctcgcctgccacgcgggaggccc

SEQ ID NO: 51794 - DNA, 27 bp, Homo Sapiens
tctcgcctgccacgcgggaggcccggg

SEQ ID NO: 51795 - DNA, 28 bp, Homo Sapiens
tctcgcctgccacgcgggaggcccgggt

SEQ ID NO: 51796 - DNA, 16 bp, Homo Sapiens
tctcgctggggcctcc

SEQ ID NO: 51797 - DNA, 17 bp, Homo Sapiens
tctcgctggggcctcca

SEQ ID NO: 51798 - DNA, 16 bp, Homo Sapiens
tctcggtggaacctcc

SEQ ID NO: 51799 - DNA, 17 bp, Homo Sapiens
tctcggtggaacctcca

SEQ ID NO: 51800 - DNA, 16 bp, Homo Sapiens
tctcggtgggacctcc

SEQ ID NO: 51801 - DNA, 17 bp, Homo Sapiens
tctcggtgggacctcca

SEQ ID NO: 51802 - DNA, 18 bp, Homo Sapiens
tctcttcgggggcgtggg

SEQ ID NO: 51803 - DNA, 19 bp, Homo Sapiens
tctcttcgggggcgtgggt

SEQ ID NO: 51804 - DNA, 16 bp, Homo Sapiens
tctgaaggtcctgagt

SEQ ID NO: 51805 - DNA, 19 bp, Homo Sapiens
tctgaaggtcctgagttcg

SEQ ID NO: 51806 - DNA, 35 bp, Homo Sapiens; identical to SEQ ID NO: 26765

SEQ ID NO: 51807 - DNA, 36 bp, Homo Sapiens; identical to SEQ ID NO: 26766

SEQ ID NO: 51808 - DNA, 37 bp, Homo Sapiens; identical to SEQ ID NO: 26767

SEQ ID NO: 51809 - DNA, 38 bp, Homo Sapiens; identical to SEQ ID NO: 26768

SEQ ID NO: 51810 - DNA, 16 bp, Homo Sapiens
tctgaaggtcgtgagt

SEQ ID NO: 51811 - DNA, 18 bp, Homo Sapiens
tctgaaggtcgtgagttc

SEQ ID NO: 51812 - DNA, 19 bp, Homo Sapiens
tctgaaggtcgtgagttcg

SEQ ID NO: 51813 - DNA, 35 bp, Homo Sapiens; identical to SEQ ID NO: 26790

SEQ ID NO: 51814 - DNA, 36 bp, Homo Sapiens; identical to SEQ ID NO: 26791

SEQ ID NO: 51815 - DNA, 37 bp, Homo Sapiens; identical to SEQ ID NO: 26792

SEQ ID NO: 51816 - DNA, 38 bp, Homo Sapiens; identical to SEQ ID NO: 26793

SEQ ID NO: 51817 - DNA, 32 bp, Homo Sapiens; identical to SEQ ID NO: 26794

SEQ ID NO: 51818 - DNA, 35 bp, Homo Sapiens; identical to SEQ ID NO: 26797

SEQ ID NO: 51819 - DNA, 36 bp, Homo Sapiens; identical to SEQ ID NO: 26798

SEQ ID NO: 51820 - DNA, 37 bp, Homo Sapiens; identical to SEQ ID NO: 26799

SEQ ID NO: 51821 - DNA, 38 bp, Homo Sapiens; identical to SEQ ID NO: 26800

SEQ ID NO: 51822 - DNA, 17 bp, Homo Sapiens
tctgaatccagcgatcc

SEQ ID NO: 51823 - DNA, 18 bp, Homo Sapiens
tctgaatccagcgatccg

SEQ ID NO: 51824 - DNA, 19 bp, Homo Sapiens
tctgaatccagcgatccga

SEQ ID NO: 51825 - DNA, 20 bp, Homo Sapiens
tctgaatccagcgatccgag

SEQ ID NO: 51826 - DNA, 21 bp, Homo Sapiens
tctgaatccagcgatccgagt

SEQ ID NO: 51827 - DNA, 22 bp, Homo Sapiens
tctgaatccagcgatccgagtt

SEQ ID NO: 51828 - DNA, 23 bp, Homo Sapiens
tctgaatccagcgatccgagttc

SEQ ID NO: 51829 - DNA, 40 bp, Homo Sapiens; identical to SEQ ID NO: 26818

SEQ ID NO: 51830 - DNA, 41 bp, Homo Sapiens; identical to SEQ ID NO: 26819

SEQ ID NO: 51831 - DNA, 43 bp, Homo Sapiens; identical to SEQ ID NO: 26821

SEQ ID NO: 51832 - DNA, 34 bp, Homo Sapiens; identical to SEQ ID NO: 26851

SEQ ID NO: 51833 - DNA, 35 bp, Homo Sapiens; identical to SEQ ID NO: 26852

SEQ ID NO: 51834 - DNA, 36 bp, Homo Sapiens; identical to SEQ ID NO: 26853

SEQ ID NO: 51835 - DNA, 37 bp, Homo Sapiens; identical to SEQ ID NO: 26854

SEQ ID NO: 51836 - DNA, 22 bp, Homo Sapiens
tctgagggtccagggttcaagt

SEQ ID NO: 51837 - DNA, 37 bp, Homo Sapiens; identical to SEQ ID NO: 26865

SEQ ID NO: 51838 - DNA, 37 bp, Homo Sapiens; identical to SEQ ID NO: 26870

SEQ ID NO: 51839 - DNA, 37 bp, Homo Sapiens; identical to SEQ ID NO: 26873

SEQ ID NO: 51840 - DNA, 32 bp, Homo Sapiens; identical to SEQ ID NO: 26876

SEQ ID NO: 51841 - DNA, 33 bp, Homo Sapiens; identical to SEQ ID NO: 26877

SEQ ID NO: 51842 - DNA, 35 bp, Homo Sapiens; identical to SEQ ID NO: 26879

SEQ ID NO: 51843 - DNA, 36 bp, Homo Sapiens; identical to SEQ ID NO: 26880

SEQ ID NO: 51844 - DNA, 37 bp, Homo Sapiens; identical to SEQ ID NO: 26881

SEQ ID NO: 51845 - DNA, 38 bp, Homo Sapiens; identical to SEQ ID NO: 26882

SEQ ID NO: 51846 - DNA, 37 bp, Homo Sapiens; identical to SEQ ID NO: 26889

SEQ ID NO: 51847 - DNA, 16 bp, Homo Sapiens
tctgcgttgtggccgc

SEQ ID NO: 51848 - DNA, 16 bp, Homo Sapiens
tctggactctgaatcc

SEQ ID NO: 51849 - DNA, 17 bp, Homo Sapiens
tctggactctgaatcca

SEQ ID NO: 51850 - DNA, 19 bp, Homo Sapiens
tctggactctgaatccagc

SEQ ID NO: 51851 - DNA, 24 bp, Homo Sapiens
tctggactctgaatccagcgatcc

SEQ ID NO: 51852 - DNA, 26 bp, Homo Sapiens
tctggactctgaatccagcgatccga

SEQ ID NO: 51853 - DNA, 27 bp, Homo Sapiens
tctggactctgaatccagcgatccgag

SEQ ID NO: 51854 - DNA, 28 bp, Homo Sapiens
tctggactctgaatccagcgatccgagt

SEQ ID NO: 51855 - DNA, 29 bp, Homo Sapiens
tctggactctgaatccagcgatccgagtt

SEQ ID NO: 51856 - DNA, 30 bp, Homo Sapiens; identical to SEQ ID NO: 26910

SEQ ID NO: 51857 - DNA, 47 bp, Homo Sapiens; identical to SEQ ID NO: 26914

SEQ ID NO: 51858 - DNA, 16 bp, Homo Sapiens
tctggactttgaatcc

SEQ ID NO: 51859 - DNA, 44 bp, Homo Sapiens; identical to SEQ ID NO: 41748

SEQ ID NO: 51860 - DNA, 45 bp, Homo Sapiens; identical to SEQ ID NO: 41749

SEQ ID NO: 51861 - DNA, 46 bp, Homo Sapiens; identical to SEQ ID NO: 26920

SEQ ID NO: 51862 - DNA, 45 bp, Homo Sapiens; identical to SEQ ID NO: 41752

SEQ ID NO: 51863 - DNA, 47 bp, Homo Sapiens; identical to SEQ ID NO: 26925

SEQ ID NO: 51864 - DNA, 30 bp, Homo Sapiens; identical to SEQ ID NO: 26928

SEQ ID NO: 51865 - DNA, 17 bp, Homo Sapiens
tcttaatcccagggtcg

SEQ ID NO: 51866 - DNA, 18 bp, Homo Sapiens
tcttaatcccagggtcgt

SEQ ID NO: 51867 - DNA, 19 bp, Homo Sapiens
tcttaatcccagggtcgtg

SEQ ID NO: 51868 - DNA, 17 bp, Homo Sapiens
tcttaatctcagggtcg

SEQ ID NO: 51869 - DNA, 18 bp, Homo Sapiens
tcttaatctcagggtcgt

SEQ ID NO: 51870 - DNA, 19 bp, Homo Sapiens
tcttaatctcagggtcgtg

SEQ ID NO: 51871 - DNA, 35 bp, Homo Sapiens; identical to SEQ ID NO: 26971

SEQ ID NO: 51872 - DNA, 17 bp, Homo Sapiens
tcttcggaggcgtgggt

SEQ ID NO: 51873 - DNA, 18 bp, Homo Sapiens
tcttcggaggcgtgggtt

SEQ ID NO: 51874 - DNA, 16 bp, Homo Sapiens
tcttcgggggcgtggg

SEQ ID NO: 51875 - DNA, 17 bp, Homo Sapiens
tcttcgggggcgtgggt

SEQ ID NO: 51876 - DNA, 18 bp, Homo Sapiens
tcttcgggggcgtgggtt

SEQ ID NO: 51877 - DNA, 16 bp, Homo Sapiens
tcttgcgacccgggtt

SEQ ID NO: 51878 - DNA, 29 bp, Homo Sapiens
tcttgcgacccgggttcgattcccgggcg

SEQ ID NO: 51879 - DNA, 30 bp, Homo Sapiens; identical to SEQ ID NO: 26998

SEQ ID NO: 51880 - DNA, 31 bp, Homo Sapiens; identical to SEQ ID NO: 26999

SEQ ID NO: 51881 - DNA, 32 bp, Homo Sapiens; identical to SEQ ID NO: 27000

SEQ ID NO: 51882 - DNA, 33 bp, Homo Sapiens; identical to SEQ ID NO: 27001

SEQ ID NO: 51883 - DNA, 34 bp, Homo Sapiens; identical to SEQ ID NO: 27002

SEQ ID NO: 51884 - DNA, 35 bp, Homo Sapiens; identical to SEQ ID NO: 27003

SEQ ID NO: 51885 - DNA, 36 bp, Homo Sapiens; identical to SEQ ID NO: 27004

SEQ ID NO: 51886 - DNA, 37 bp, Homo Sapiens; identical to SEQ ID NO: 27005

SEQ ID NO: 51887 - DNA, 16 bp, Homo Sapiens
tcttggtgggacctcc

SEQ ID NO: 51888 - DNA, 19 bp, Homo Sapiens
tgaaaacctttttccaagg

SEQ ID NO: 51889 - DNA, 20 bp, Homo Sapiens
tgaaaacctttttccaagga

SEQ ID NO: 51890 - DNA, 21 bp, Homo Sapiens
tgaaaacctttttccaaggac

SEQ ID NO: 51891 - DNA, 22 bp, Homo Sapiens
tgaaaacctttttccaaggaca

SEQ ID NO: 51892 - DNA, 23 bp, Homo Sapiens
tgaaaacctttttccaaggacac

SEQ ID NO: 51893 - DNA, 24 bp, Homo Sapiens
tgaaaacctttttccaaggacacc

SEQ ID NO: 51894 - DNA, 25 bp, Homo Sapiens
tgaaaacctttttccaaggacacca

SEQ ID NO: 51895 - DNA, 19 bp, Homo Sapiens
tgaaaatgtttagacgggc

SEQ ID NO: 51896 - DNA, 20 bp, Homo Sapiens
tgaaaatgtttagacgggct

SEQ ID NO: 51897 - DNA, 16 bp, Homo Sapiens
tgaaggtcctgagttc

SEQ ID NO: 51898 - DNA, 17 bp, Homo Sapiens
tgaaggtcctgagttcg

SEQ ID NO: 51899 - DNA, 32 bp, Homo Sapiens; identical to SEQ ID NO: 27087

SEQ ID NO: 51900 - DNA, 17 bp, Homo Sapiens
tgaaggtcgtgagttcg

SEQ ID NO: 51901 - DNA, 16 bp, Homo Sapiens
tgaatccagcgatccg

SEQ ID NO: 51902 - DNA, 17 bp, Homo Sapiens
tgaatccagcgatccga

SEQ ID NO: 51903 - DNA, 18 bp, Homo Sapiens
tgaatccagcgatccgag

SEQ ID NO: 51904 - DNA, 19 bp, Homo Sapiens
tgaatccagcgatccgagt

SEQ ID NO: 51905 - DNA, 20 bp, Homo Sapiens
tgaatccagcgatccgagtt

SEQ ID NO: 51906 - DNA, 21 bp, Homo Sapiens
tgaatccagcgatccgagttc

SEQ ID NO: 51907 - DNA, 22 bp, Homo Sapiens
tgaatccagcgatccgagttca

SEQ ID NO: 51908 - DNA, 21 bp, Homo Sapiens
tgaatctgacaacagaggctt

SEQ ID NO: 51909 - DNA, 26 bp, Homo Sapiens
tgaatctgacaacagaggcttacgac

SEQ ID NO: 51910 - DNA, 27 bp, Homo Sapiens
tgaatctgacaacagaggcttacgacc

SEQ ID NO: 51911 - DNA, 28 bp, Homo Sapiens
tgaatctgacaacagaggcttacgaccc

SEQ ID NO: 51912 - DNA, 29 bp, Homo Sapiens
tgaatctgacaacagaggcttacgacccc

SEQ ID NO: 51913 - DNA, 30 bp, Homo Sapiens; identical to SEQ ID NO: 27160

SEQ ID NO: 51914 - DNA, 31 bp, Homo Sapiens; identical to SEQ ID NO: 27161

SEQ ID NO: 51915 - DNA, 32 bp, Homo Sapiens; identical to SEQ ID NO: 27162

SEQ ID NO: 51916 - DNA, 33 bp, Homo Sapiens; identical to SEQ ID NO: 27163

SEQ ID NO: 51917 - DNA, 34 bp, Homo Sapiens; identical to SEQ ID NO: 27164

SEQ ID NO: 51918 - DNA, 35 bp, Homo Sapiens; identical to SEQ ID NO: 27165

SEQ ID NO: 51919 - DNA, 36 bp, Homo Sapiens; identical to SEQ ID NO: 27166

SEQ ID NO: 51920 - DNA, 37 bp, Homo Sapiens; identical to SEQ ID NO: 27167

SEQ ID NO: 51921 - DNA, 38 bp, Homo Sapiens; identical to SEQ ID NO: 27168

SEQ ID NO: 51922 - DNA, 39 bp, Homo Sapiens; identical to SEQ ID NO: 27169

SEQ ID NO: 51923 - DNA, 40 bp, Homo Sapiens; identical to SEQ ID NO: 27170

SEQ ID NO: 51924 - DNA, 41 bp, Homo Sapiens; identical to SEQ ID NO: 27171

SEQ ID NO: 51925 - DNA, 43 bp, Homo Sapiens; identical to SEQ ID NO: 27176

SEQ ID NO: 51926 - DNA, 22 bp, Homo Sapiens
tgacaacagaggcttacgaccc

SEQ ID NO: 51927 - DNA, 33 bp, Homo Sapiens; identical to SEQ ID NO: 27196

SEQ ID NO: 51928 - DNA, 34 bp, Homo Sapiens; identical to SEQ ID NO: 27197

SEQ ID NO: 51929 - DNA, 35 bp, Homo Sapiens; identical to SEQ ID NO: 27198

SEQ ID NO: 51930 - DNA, 32 bp, Homo Sapiens; identical to SEQ ID NO: 27208

SEQ ID NO: 51931 - DNA, 22 bp, Homo Sapiens
tgactccagatcagaaggctgc

SEQ ID NO: 51932 - DNA, 21 bp, Homo Sapiens
tgactccagatcagaaggttg

SEQ ID NO: 51933 - DNA, 22 bp, Homo Sapiens
tgactgcagatcaagaggtccc

SEQ ID NO: 51934 - DNA, 23 bp, Homo Sapiens
tgactgcagatcaagaggtcccc

SEQ ID NO: 51935 - DNA, 24 bp, Homo Sapiens
tgactgcagatcaagaggtccccg

SEQ ID NO: 51936 - DNA, 26 bp, Homo Sapiens
tgactgcagatcaagaggtccccggt

SEQ ID NO: 51937 - DNA, 24 bp, Homo Sapiens
tgactgcagatcaagaggtccctg

SEQ ID NO: 51938 - DNA, 26 bp, Homo Sapiens
tgacttcggatcagaagattgagggt

SEQ ID NO: 51939 - DNA, 27 bp, Homo Sapiens
tgacttcggatcagaagattgagggtt

SEQ ID NO: 51940 - DNA, 22 bp, Homo Sapiens
tgagcactctggactctgaatc

SEQ ID NO: 51941 - DNA, 35 bp, Homo Sapiens; identical to SEQ ID NO: 27238

SEQ ID NO: 51942 - DNA, 33 bp, Homo Sapiens; identical to SEQ ID NO: 27242

SEQ ID NO: 51943 - DNA, 30 bp, Homo Sapiens; identical to SEQ ID NO: 27252

SEQ ID NO: 51944 - DNA, 35 bp, Homo Sapiens; identical to SEQ ID NO: 27257

SEQ ID NO: 51945 - DNA, 16 bp, Homo Sapiens
tgagggtccagggttc

SEQ ID NO: 51946 - DNA, 32 bp, Homo Sapiens; identical to SEQ ID NO: 27268

SEQ ID NO: 51947 - DNA, 33 bp, Homo Sapiens; identical to SEQ ID NO: 27269

SEQ ID NO: 51948 - DNA, 34 bp, Homo Sapiens; identical to SEQ ID NO: 27270

SEQ ID NO: 51949 - DNA, 35 bp, Homo Sapiens; identical to SEQ ID NO: 27271

SEQ ID NO: 51950 - DNA, 36 bp, Homo Sapiens; identical to SEQ ID NO: 27272

SEQ ID NO: 51951 - DNA, 27 bp, Homo Sapiens
tgagggttcgaatcccttcgtggttgc

SEQ ID NO: 51952 - DNA, 28 bp, Homo Sapiens
tgagggttcgaatcccttcgtggttgcc

SEQ ID NO: 51953 - DNA, 27 bp, Homo Sapiens
tgagggttcgagtcccttcgtggtcgc

SEQ ID NO: 51954 - DNA, 28 bp, Homo Sapiens
tgagggttcgagtcccttcgtggtcgcc

SEQ ID NO: 51955 - DNA, 29 bp, Homo Sapiens
tgagggttcgagtcccttcgtggtcgcca

SEQ ID NO: 51956 - DNA, 35 bp, Homo Sapiens
tgaggtcccgggttcgatccccagcatctccacca

SEQ ID NO: 51957 - DNA, 17 bp, Homo Sapiens
tgagtgaagcattggac

SEQ ID NO: 51958 - DNA, 23 bp, Homo Sapiens
tgagttcgaacctcagagggggc

SEQ ID NO: 51959 - DNA, 24 bp, Homo Sapiens
tgagttcgaacctcagagggggca

SEQ ID NO: 51960 - DNA, 33 bp, Homo Sapiens; identical to SEQ ID NO: 27345

SEQ ID NO: 51961 - DNA, 24 bp, Homo Sapiens
tgatcgtatagtggttagtactct

SEQ ID NO: 51962 - DNA, 25 bp, Homo Sapiens
tgatcgtatagtggttagtactctg

SEQ ID NO: 51963 - DNA, 27 bp, Homo Sapiens
tgatcgtatagtggttagtactctgcg

SEQ ID NO: 51964 - DNA, 28 bp, Homo Sapiens
tgatcgtatagtggttagtactctgcgt

SEQ ID NO: 51965 - DNA, 29 bp, Homo Sapiens
tgatcgtatagtggttagtactctgcgtt

SEQ ID NO: 51966 - DNA, 26 bp, Homo Sapiens
tgattccggatcagaagattgagggt

SEQ ID NO: 51967 - DNA, 19 bp, Homo Sapiens
tgattctcggtttgggtcc

SEQ ID NO: 51968 - DNA, 20 bp, Homo Sapiens
tgattctcggtttgggtccg

SEQ ID NO: 51969 - DNA, 30 bp, Homo Sapiens; identical to SEQ ID NO: 27440

SEQ ID NO: 51970 - DNA, 36 bp, Homo Sapiens; identical to SEQ ID NO: 27441

SEQ ID NO: 51971 - DNA, 37 bp, Homo Sapiens; identical to SEQ ID NO: 27442

SEQ ID NO: 51972 - DNA, 38 bp, Homo Sapiens; identical to SEQ ID NO: 27443

SEQ ID NO: 51973 - DNA, 39 bp, Homo Sapiens; identical to SEQ ID NO: 27444

SEQ ID NO: 51974 - DNA, 40 bp, Homo Sapiens; identical to SEQ ID NO: 27445

SEQ ID NO: 51975 - DNA, 22 bp, Homo Sapiens
tgcaactccaaataaaagtacc

SEQ ID NO: 51976 - DNA, 23 bp, Homo Sapiens
tgcaactccaaataaaagtacca

SEQ ID NO: 51977 - DNA, 21 bp, Homo Sapiens
tgcaatacttaatttctgcca

SEQ ID NO: 51978 - DNA, 32 bp, Homo Sapiens; identical to SEQ ID NO: 27466

SEQ ID NO: 51979 - DNA, 33 bp, Homo Sapiens; identical to SEQ ID NO: 27467

SEQ ID NO: 51980 - DNA, 34 bp, Homo Sapiens; identical to SEQ ID NO: 27468

SEQ ID NO: 51981 - DNA, 35 bp, Homo Sapiens; identical to SEQ ID NO: 27469

SEQ ID NO: 51982 - DNA, 36 bp, Homo Sapiens; identical to SEQ ID NO: 41903

SEQ ID NO: 51983 - DNA, 37 bp, Homo Sapiens; identical to SEQ ID NO: 27470

SEQ ID NO: 51984 - DNA, 38 bp, Homo Sapiens; identical to SEQ ID NO: 27471

SEQ ID NO: 51985 - DNA, 39 bp, Homo Sapiens; identical to SEQ ID NO: 27472

SEQ ID NO: 51986 - DNA, 34 bp, Homo Sapiens; identical to SEQ ID NO: 27482

SEQ ID NO: 51987 - DNA, 25 bp, Homo Sapiens
tgcaggttcgagtcctgccgcggtc

SEQ ID NO: 51988 - DNA, 27 bp, Homo Sapiens
tgcaggttcgagtcctgccgcggtcgc

SEQ ID NO: 51989 - DNA, 28 bp, Homo Sapiens
tgcaggttcgagtcctgccgcggtcgcc

SEQ ID NO: 51990 - DNA, 20 bp, Homo Sapiens
tgcagtggtagaattctcgc

SEQ ID NO: 51991 - DNA, 21 bp, Homo Sapiens
tgcagtggtagaattctcgcc

SEQ ID NO: 51992 - DNA, 22 bp, Homo Sapiens
tgcagtggtagaattctcgcct

SEQ ID NO: 51993 - DNA, 36 bp, Homo Sapiens; identical to SEQ ID NO: 27494

SEQ ID NO: 51994 - DNA, 37 bp, Homo Sapiens; identical to SEQ ID NO: 27495

SEQ ID NO: 51995 - DNA, 38 bp, Homo Sapiens; identical to SEQ ID NO: 27496

SEQ ID NO: 51996 - DNA, 33 bp, Homo Sapiens; identical to SEQ ID NO: 27500

SEQ ID NO: 51997 - DNA, 17 bp, Homo Sapiens
tgccacgcgggaggccc

SEQ ID NO: 51998 - DNA, 21 bp, Homo Sapiens
tgccacgcgggaggcccgggt

SEQ ID NO: 51999 - DNA, 24 bp, Homo Sapiens
tgcccccatgtctaacaacatggc

SEQ ID NO: 52000 - DNA, 25 bp, Homo Sapiens
tgcccccatgtctaacaacatggct

SEQ ID NO: 52001 - DNA, 31 bp, Homo Sapiens; identical to SEQ ID NO: 27530

SEQ ID NO: 52002 - DNA, 17 bp, Homo Sapiens
tgcccgcatcctccacc

SEQ ID NO: 52003 - DNA, 18 bp, Homo Sapiens
tgcccgcatcctccacca

SEQ ID NO: 52004 - DNA, 17 bp, Homo Sapiens
tgcccgcattctccacc

SEQ ID NO: 52005 - DNA, 18 bp, Homo Sapiens
tgcccgcattctccacca

SEQ ID NO: 52006 - DNA, 37 bp, Homo Sapiens; identical to SEQ ID NO: 27542

SEQ ID NO: 52007 - DNA, 16 bp, Homo Sapiens
tgccgtgatcgtatag

SEQ ID NO: 52008 - DNA, 17 bp, Homo Sapiens
tgccgtgatcgtatagt

SEQ ID NO: 52009 - DNA, 18 bp, Homo Sapiens
tgccgtgatcgtatagtg

SEQ ID NO: 52010 - DNA, 19 bp, Homo Sapiens
tgccgtgatcgtatagtgg

SEQ ID NO: 52011 - DNA, 21 bp, Homo Sapiens
tgccgtgatcgtatagtggtt

SEQ ID NO: 52012 - DNA, 22 bp, Homo Sapiens
tgccgtgatcgtatagtggtta

SEQ ID NO: 52013 - DNA, 23 bp, Homo Sapiens
tgccgtgatcgtatagtggttag

SEQ ID NO: 52014 - DNA, 24 bp, Homo Sapiens
tgccgtgatcgtatagtggttagt

SEQ ID NO: 52015 - DNA, 25 bp, Homo Sapiens
tgccgtgatcgtatagtggttagta

SEQ ID NO: 52016 - DNA, 26 bp, Homo Sapiens
tgccgtgatcgtatagtggttagtac

SEQ ID NO: 52017 - DNA, 27 bp, Homo Sapiens
tgccgtgatcgtatagtggttagtact

SEQ ID NO: 52018 - DNA, 28 bp, Homo Sapiens
tgccgtgatcgtatagtggttagtactc

SEQ ID NO: 52019 - DNA, 29 bp, Homo Sapiens
tgccgtgatcgtatagtggttagtactct

SEQ ID NO: 52020 - DNA, 30 bp, Homo Sapiens; identical to SEQ ID NO: 27558

SEQ ID NO: 52021 - DNA, 31 bp, Homo Sapiens; identical to SEQ ID NO: 27559

SEQ ID NO: 52022 - DNA, 32 bp, Homo Sapiens; identical to SEQ ID NO: 27560

SEQ ID NO: 52023 - DNA, 33 bp, Homo Sapiens; identical to SEQ ID NO: 27561

SEQ ID NO: 52024 - DNA, 34 bp, Homo Sapiens; identical to SEQ ID NO: 27562

SEQ ID NO: 52025 - DNA, 35 bp, Homo Sapiens; identical to SEQ ID NO: 27563

SEQ ID NO: 52026 - DNA, 36 bp, Homo Sapiens; identical to SEQ ID NO: 27564

SEQ ID NO: 52027 - DNA, 37 bp, Homo Sapiens; identical to SEQ ID NO: 27565

SEQ ID NO: 52028 - DNA, 23 bp, Homo Sapiens
tgccttccaagcagttgacccgg

SEQ ID NO: 52029 - DNA, 28 bp, Homo Sapiens
tgcgacccgggttcgattcccgggcggc

SEQ ID NO: 52030 - DNA, 34 bp, Homo Sapiens; identical to SEQ ID NO: 27585

SEQ ID NO: 52031 - DNA, 35 bp, Homo Sapiens; identical to SEQ ID NO: 27586

SEQ ID NO: 52032 - DNA, 36 bp, Homo Sapiens; identical to SEQ ID NO: 27587

SEQ ID NO: 52033 - DNA, 37 bp, Homo Sapiens; identical to SEQ ID NO: 27588

SEQ ID NO: 52034 - DNA, 38 bp, Homo Sapiens; identical to SEQ ID NO: 27589

SEQ ID NO: 52035 - DNA, 16 bp, Homo Sapiens
tgctaatccattgtgc

SEQ ID NO: 52036 - DNA, 17 bp, Homo Sapiens
tgctaatccattgtgct

SEQ ID NO: 52037 - DNA, 21 bp, Homo Sapiens
tgctaatccattgtgctttgc

SEQ ID NO: 52038 - DNA, 34 bp, Homo Sapiens; identical to SEQ ID NO: 27658

SEQ ID NO: 52039 - DNA, 35 bp, Homo Sapiens; identical to SEQ ID NO: 27659

SEQ ID NO: 52040 - DNA, 26 bp, Homo Sapiens
tgctttacacgcagaaggtcctgggt

SEQ ID NO: 52041 - DNA, 47 bp, Homo Sapiens; identical to SEQ ID NO: 27672

SEQ ID NO: 52042 - DNA, 18 bp, Homo Sapiens
tgctttgcacgcgtgggt

SEQ ID NO: 52043 - DNA, 39 bp, Homo Sapiens; identical to SEQ ID NO: 41976

SEQ ID NO: 52044 - DNA, 21 bp, Homo Sapiens
tggacatatgtccgcgtgggt

SEQ ID NO: 52045 - DNA, 23 bp, Homo Sapiens
tggacatatgtccgcgtgggttc

SEQ ID NO: 52046 - DNA, 17 bp, Homo Sapiens
tggactctgaatccagc

SEQ ID NO: 52047 - DNA, 24 bp, Homo Sapiens
tggactctgaatccagcgatccga

SEQ ID NO: 52048 - DNA, 25 bp, Homo Sapiens
tggactctgaatccagcgatccgag

SEQ ID NO: 52049 - DNA, 26 bp, Homo Sapiens
tggactctgaatccagcgatccgagt

SEQ ID NO: 52050 - DNA, 27 bp, Homo Sapiens
tggactctgaatccagcgatccgagtt

SEQ ID NO: 52051 - DNA, 28 bp, Homo Sapiens
tggactctgaatccagcgatccgagttc

SEQ ID NO: 52052 - DNA, 45 bp, Homo Sapiens; identical to SEQ ID NO: 27695

SEQ ID NO: 52053 - DNA, 16 bp, Homo Sapiens
tggaggcgtgggttcg

SEQ ID NO: 52054 - DNA, 22 bp, Homo Sapiens
tggaggcgtgggttcgaatccc

SEQ ID NO: 52055 - DNA, 34 bp, Homo Sapiens; identical to SEQ ID NO: 27711

SEQ ID NO: 52056 - DNA, 26 bp, Homo Sapiens
tggagttaaagactttttctctgacc

SEQ ID NO: 52057 - DNA, 27 bp, Homo Sapiens
tggagttaaagactttttctctgacca

SEQ ID NO: 52058 - DNA, 18 bp, Homo Sapiens
tggataacgcgtctgact

SEQ ID NO: 52059 - DNA, 16 bp, Homo Sapiens
tggataaggcactggc

SEQ ID NO: 52060 - DNA, 35 bp, Homo Sapiens; identical to SEQ ID NO: 42001

SEQ ID NO: 52061 - DNA, 16 bp, Homo Sapiens
tggataaggcattggc

SEQ ID NO: 52062 - DNA, 26 bp, Homo Sapiens
tggataaggcattggcctcctaagcc

SEQ ID NO: 52063 - DNA, 16 bp, Homo Sapiens
tggataaggcgtctga

SEQ ID NO: 52064 - DNA, 18 bp, Homo Sapiens
tggataaggcgtctgact

SEQ ID NO: 52065 - DNA, 20 bp, Homo Sapiens
tggataaggcgtctgattcc

SEQ ID NO: 52066 - DNA, 16 bp, Homo Sapiens
tggatagcgcattgga

SEQ ID NO: 52067 - DNA, 29 bp, Homo Sapiens
tggatagctcagtcggtagagcatcagac

SEQ ID NO: 52068 - DNA, 25 bp, Homo Sapiens
tggatcgaaaccatcctctgctacc

SEQ ID NO: 52069 - DNA, 16 bp, Homo Sapiens
tggccgagtggttaag

SEQ ID NO: 52070 - DNA, 21 bp, Homo Sapiens
tggccgcagcaacctcggttc

SEQ ID NO: 52071 - DNA, 22 bp, Homo Sapiens
tggccgcagcaacctcggttcg

SEQ ID NO: 52072 - DNA, 23 bp, Homo Sapiens
tggccgcagcaacctcggttcga

SEQ ID NO: 52073 - DNA, 40 bp, Homo Sapiens; identical to SEQ ID NO: 27765

SEQ ID NO: 52074 - DNA, 41 bp, Homo Sapiens; identical to SEQ ID NO: 27766

SEQ ID NO: 52075 - DNA, 24 bp, Homo Sapiens
tggcgcagcggaagcgtgctgggc

SEQ ID NO: 52076 - DNA, 26 bp, Homo Sapiens
tggcgcagcggaagcgtgctgggccc

SEQ ID NO: 52077 - DNA, 20 bp, Homo Sapiens
tggcgtgggttcgaatccca

SEQ ID NO: 52078 - DNA, 16 bp, Homo Sapiens
tggctaggattcggcg

SEQ ID NO: 52079 - DNA, 17 bp, Homo Sapiens
tggctaggattcggcgc

SEQ ID NO: 52080 - DNA, 22 bp, Homo Sapiens
tggctaggattcggcgctttca

SEQ ID NO: 52081 - DNA, 21 bp, Homo Sapiens
tggctgagtgaagcattggac

SEQ ID NO: 52082 - DNA, 25 bp, Homo Sapiens
tggctgagtgaagcattggactgta

SEQ ID NO: 52083 - DNA, 27 bp, Homo Sapiens
tgggcccataacccagaggtcgatgga

SEQ ID NO: 52084 - DNA, 28 bp, Homo Sapiens
tgggcccataacccagaggtcgatggat

SEQ ID NO: 52085 - DNA, 16 bp, Homo Sapiens
tggggattgtgggttc

SEQ ID NO: 52086 - DNA, 17 bp, Homo Sapiens
tggggattgtgggttcg

SEQ ID NO: 52087 - DNA, 21 bp, Homo Sapiens
tggggattgtgggttcgagtc

SEQ ID NO: 52088 - DNA, 22 bp, Homo Sapiens
tggggattgtgggttcgagtcc

SEQ ID NO: 52089 - DNA, 23 bp, Homo Sapiens
tggggattgtgggttcgagtccc

SEQ ID NO: 52090 - DNA, 26 bp, Homo Sapiens
tggggattgtgggttcgagtcccatc

SEQ ID NO: 52091 - DNA, 34 bp, Homo Sapiens; identical to SEQ ID NO: 27816

SEQ ID NO: 52092 - DNA, 35 bp, Homo Sapiens; identical to SEQ ID NO: 27817

SEQ ID NO: 52093 - DNA, 36 bp, Homo Sapiens; identical to SEQ ID NO: 27818

SEQ ID NO: 52094 - DNA, 20 bp, Homo Sapiens
tggggtctccccgcgcaggt

SEQ ID NO: 52095 - DNA, 26 bp, Homo Sapiens
tggggtgtgataggtggcacggagaa

SEQ ID NO: 52096 - DNA, 20 bp, Homo Sapiens
tggggtttccccgcgcaggt

SEQ ID NO: 52097 - DNA, 16 bp, Homo Sapiens
tggggttttgcagtcc

SEQ ID NO: 52098 - DNA, 21 bp, Homo Sapiens
tgggtgcgagaggtcccgggt

SEQ ID NO: 52099 - DNA, 22 bp, Homo Sapiens
tgggtgcgagaggtcccgggtt

SEQ ID NO: 52100 - DNA, 17 bp, Homo Sapiens
tgggtggttcagtggta

SEQ ID NO: 52101 - DNA, 23 bp, Homo Sapiens
tgggtggttcagtggtagaattc

SEQ ID NO: 52102 - DNA, 27 bp, Homo Sapiens
tgggtggttcagtggtagaattctcgc

SEQ ID NO: 52103 - DNA, 28 bp, Homo Sapiens
tgggtggttcagtggtagaattctcgcc

SEQ ID NO: 52104 - DNA, 29 bp, Homo Sapiens
tgggtggttcagtggtagaattctcgcct

SEQ ID NO: 52105 - DNA, 31 bp, Homo Sapiens; identical to SEQ ID NO: 27860

SEQ ID NO: 52106 - DNA, 32 bp, Homo Sapiens; identical to SEQ ID NO: 27861

SEQ ID NO: 52107 - DNA, 45 bp, Homo Sapiens; identical to SEQ ID NO: 42058

SEQ ID NO: 52108 - DNA, 26 bp, Homo Sapiens
tgggttcgaatcccaccgctgccacc

SEQ ID NO: 52109 - DNA, 26 bp, Homo Sapiens
tgggttcgaatcccaccttcgtcgcc

SEQ ID NO: 52110 - DNA, 26 bp, Homo Sapiens
tgggttcgaatcccactcctgacacc

SEQ ID NO: 52111 - DNA, 24 bp, Homo Sapiens
tgggttcgaatcccacttctgaca

SEQ ID NO: 52112 - DNA, 25 bp, Homo Sapiens
tgggttcgaatcccagcggggcctc

SEQ ID NO: 52113 - DNA, 21 bp, Homo Sapiens
tgggttcgaatcccagcggtg

SEQ ID NO: 52114 - DNA, 24 bp, Homo Sapiens
tgggttcgaatcccagcggtgcct

SEQ ID NO: 52115 - DNA, 25 bp, Homo Sapiens
tgggttcgaatcccagcggtgcctc

SEQ ID NO: 52116 - DNA, 26 bp, Homo Sapiens
tgggttcgaatcccagcggtgcctcc

SEQ ID NO: 52117 - DNA, 24 bp, Homo Sapiens
tgggttcgaatcccatcctcgtcg

SEQ ID NO: 52118 - DNA, 25 bp, Homo Sapiens
tgggttcgaatcccatcctcgtcgc

SEQ ID NO: 52119 - DNA, 26 bp, Homo Sapiens
tgggttcgaatcccatcctcgtcgcc

SEQ ID NO: 52120 - DNA, 27 bp, Homo Sapiens
tgggttcgaatcccatcctcgtcgcca

SEQ ID NO: 52121 - DNA, 25 bp, Homo Sapiens
tgggttcgagccccacgttgggcgc

SEQ ID NO: 52122 - DNA, 23 bp, Homo Sapiens
tgggttcgagccccagtggaacc

SEQ ID NO: 52123 - DNA, 26 bp, Homo Sapiens
tgggttcgagccccagtggaaccacc

SEQ ID NO: 52124 - DNA, 24 bp, Homo Sapiens
tgggttcgattctcatagtcctag

SEQ ID NO: 52125 - DNA, 25 bp, Homo Sapiens
tgggttcgattctcatagtcctagc

SEQ ID NO: 52126 - DNA, 25 bp, Homo Sapiens
tgggtttaagtcccattggtctagc

SEQ ID NO: 52127 - DNA, 24 bp, Homo Sapiens
tggtaagcactctggactctgaat

SEQ ID NO: 52128 - DNA, 16 bp, Homo Sapiens
tggtagaattctcgcc

SEQ ID NO: 52129 - DNA, 17 bp, Homo Sapiens
tggtagaattctcgcct

SEQ ID NO: 52130 - DNA, 20 bp, Homo Sapiens
tggtagaattctcgcctccc

SEQ ID NO: 52131 - DNA, 33 bp, Homo Sapiens; identical to SEQ ID NO: 42090

SEQ ID NO: 52132 - DNA, 35 bp, Homo Sapiens; identical to SEQ ID NO: 27904

SEQ ID NO: 52133 - DNA, 33 bp, Homo Sapiens
tggtagaattctcgcctcccatgcgggagaccc

SEQ ID NO: 52134 - DNA, 18 bp, Homo Sapiens
tggtagaattctcgcctg

SEQ ID NO: 52135 - DNA, 19 bp, Homo Sapiens
tggtagaattctcgcctgc

SEQ ID NO: 52136 - DNA, 20 bp, Homo Sapiens
tggtagaattctcgcctgcc

SEQ ID NO: 52137 - DNA, 21 bp, Homo Sapiens
tggtagaattctcgcctgcca

SEQ ID NO: 52138 - DNA, 22 bp, Homo Sapiens
tggtagaattctcgcctgccac

SEQ ID NO: 52139 - DNA, 23 bp, Homo Sapiens
tggtagaattctcgcctgccacg

SEQ ID NO: 52140 - DNA, 24 bp, Homo Sapiens
tggtagaattctcgcctgccacgc

SEQ ID NO: 52141 - DNA, 25 bp, Homo Sapiens
tggtagaattctcgcctgccacgcg

SEQ ID NO: 52142 - DNA, 26 bp, Homo Sapiens
tggtagaattctcgcctgccacgcgg

SEQ ID NO: 52143 - DNA, 27 bp, Homo Sapiens
tggtagaattctcgcctgccacgcggg

SEQ ID NO: 52144 - DNA, 28 bp, Homo Sapiens
tggtagaattctcgcctgccacgcggga

SEQ ID NO: 52145 - DNA, 29 bp, Homo Sapiens
tggtagaattctcgcctgccacgcgggag

SEQ ID NO: 52146 - DNA, 31 bp, Homo Sapiens; identical to SEQ ID NO: 27918

SEQ ID NO: 52147 - DNA, 32 bp, Homo Sapiens; identical to SEQ ID NO: 27919

SEQ ID NO: 52148 - DNA, 33 bp, Homo Sapiens; identical to SEQ ID NO: 27920

SEQ ID NO: 52149 - DNA, 34 bp, Homo Sapiens; identical to SEQ ID NO: 27921

SEQ ID NO: 52150 - DNA, 35 bp, Homo Sapiens; identical to SEQ ID NO: 27922

SEQ ID NO: 52151 - DNA, 36 bp, Homo Sapiens; identical to SEQ ID NO: 27923

SEQ ID NO: 52152 - DNA, 37 bp, Homo Sapiens; identical to SEQ ID NO: 27924

SEQ ID NO: 52153 - DNA, 38 bp, Homo Sapiens; identical to SEQ ID NO: 27925

SEQ ID NO: 52154 - DNA, 39 bp, Homo Sapiens; identical to SEQ ID NO: 27927

SEQ ID NO: 52155 - DNA, 16 bp, Homo Sapiens
tggtagaattcttgcc

SEQ ID NO: 52156 - DNA, 20 bp, Homo Sapiens
tggtagaattcttgcctgcc

SEQ ID NO: 52157 - DNA, 16 bp, Homo Sapiens
tggtagagcatttgac

SEQ ID NO: 52158 - DNA, 17 bp, Homo Sapiens
tggtagagcatttgact

SEQ ID NO: 52159 - DNA, 19 bp, Homo Sapiens
tggtagagcatttgactgc

SEQ ID NO: 52160 - DNA, 24 bp, Homo Sapiens
tggtagagcatttgactgcagatc

SEQ ID NO: 52161 - DNA, 27 bp, Homo Sapiens
tggtagagcatttgactgcagatcaag

SEQ ID NO: 52162 - DNA, 16 bp, Homo Sapiens
tggtagagcgcatgct

SEQ ID NO: 52163 - DNA, 20 bp, Homo Sapiens
tggtagagcgcgcgcttcgc

SEQ ID NO: 52164 - DNA, 16 bp, Homo Sapiens
tggtagagcgcgtgct

SEQ ID NO: 52165 - DNA, 17 bp, Homo Sapiens
tggtagagcgcgtgctt

SEQ ID NO: 52166 - DNA, 16 bp, Homo Sapiens
tggtagagcgctcgct

SEQ ID NO: 52167 - DNA, 44 bp, Homo Sapiens; identical to SEQ ID NO: 27956

SEQ ID NO: 52168 - DNA, 46 bp, Homo Sapiens; identical to SEQ ID NO: 42128

SEQ ID NO: 52169 - DNA, 44 bp, Homo Sapiens; identical to SEQ ID NO: 27961

SEQ ID NO: 52170 - DNA, 36 bp, Homo Sapiens; identical to SEQ ID NO: 27963

SEQ ID NO: 52171 - DNA, 37 bp, Homo Sapiens; identical to SEQ ID NO: 27964

SEQ ID NO: 52172 - DNA, 17 bp, Homo Sapiens
tggtatcatgcaagatt

SEQ ID NO: 52173 - DNA, 16 bp, Homo Sapiens
tggtcatcacgttcgc

SEQ ID NO: 52174 - DNA, 17 bp, Homo Sapiens
tggtcatcacgttcgcc

SEQ ID NO: 52175 - DNA, 18 bp, Homo Sapiens
tggtcatcacgttcgcct

SEQ ID NO: 52176 - DNA, 16 bp, Homo Sapiens
tggtcgtggttgtagt

SEQ ID NO: 52177 - DNA, 17 bp, Homo Sapiens
tggtcgtggttgtagtc

SEQ ID NO: 52178 - DNA, 18 bp, Homo Sapiens
tggtcgtggttgtagtcc

SEQ ID NO: 52179 - DNA, 19 bp, Homo Sapiens
tggtcgtggttgtagtccg

SEQ ID NO: 52180 - DNA, 20 bp, Homo Sapiens
tggtcgtggttgtagtccgt

SEQ ID NO: 52181 - DNA, 22 bp, Homo Sapiens
tggtcgtggttgtagtccgtgc

SEQ ID NO: 52182 - DNA, 23 bp, Homo Sapiens
tggtcgtggttgtagtccgtgcg

SEQ ID NO: 52183 - DNA, 24 bp, Homo Sapiens
tggtcgtggttgtagtccgtgcga

SEQ ID NO: 52184 - DNA, 26 bp, Homo Sapiens
tggtcgtggttgtagtccgtgcgaga

SEQ ID NO: 52185 - DNA, 27 bp, Homo Sapiens
tggtcgtggttgtagtccgtgcgagaa

SEQ ID NO: 52186 - DNA, 28 bp, Homo Sapiens
tggtcgtggttgtagtccgtgcgagaat

SEQ ID NO: 52187 - DNA, 29 bp, Homo Sapiens
tggtcgtggttgtagtccgtgcgagaata

SEQ ID NO: 52188 - DNA, 31 bp, Homo Sapiens; identical to SEQ ID NO: 27987

SEQ ID NO: 52189 - DNA, 32 bp, Homo Sapiens; identical to SEQ ID NO: 27988

SEQ ID NO: 52190 - DNA, 17 bp, Homo Sapiens
tggtctaaggcgctgga

SEQ ID NO: 52191 - DNA, 19 bp, Homo Sapiens
tggtctagcggttaggatt

SEQ ID NO: 52192 - DNA, 20 bp, Homo Sapiens
tggtctagcggttaggattc

SEQ ID NO: 52193 - DNA, 21 bp, Homo Sapiens
tggtctagcggttaggattcc

SEQ ID NO: 52194 - DNA, 22 bp, Homo Sapiens
tggtctagcggttaggattcct

SEQ ID NO: 52195 - DNA, 23 bp, Homo Sapiens
tggtctagcggttaggattcctg

SEQ ID NO: 52196 - DNA, 24 bp, Homo Sapiens
tggtctagcggttaggattcctgg

SEQ ID NO: 52197 - DNA, 26 bp, Homo Sapiens
tggtctagcggttaggattcctggtt

SEQ ID NO: 52198 - DNA, 27 bp, Homo Sapiens
tggtctagcggttaggattcctggttt

SEQ ID NO: 52199 - DNA, 33 bp, Homo Sapiens; identical to SEQ ID NO: 28006

SEQ ID NO: 52200 - DNA, 35 bp, Homo Sapiens; identical to SEQ ID NO: 42166

SEQ ID NO: 52201 - DNA, 42 bp, Homo Sapiens; identical to SEQ ID NO: 28008

SEQ ID NO: 52202 - DNA, 45 bp, Homo Sapiens
tggtctagcggttaggattcctggttttcacccaggtggcccggg

SEQ ID NO: 52203 - DNA, 16 bp, Homo Sapiens
tggtctaggggtatga

SEQ ID NO: 52204 - DNA, 21 bp, Homo Sapiens
tggtctaggggtatgattctc

SEQ ID NO: 52205 - DNA, 23 bp, Homo Sapiens
tggtctaggggtatgattctcgc

SEQ ID NO: 52206 - DNA, 24 bp, Homo Sapiens
tggtctaggggtatgattctcgct

SEQ ID NO: 52207 - DNA, 25 bp, Homo Sapiens
tggtctaggggtatgattctcgctt

SEQ ID NO: 52208 - DNA, 23 bp, Homo Sapiens
tggtctagtggctaggattcggc

SEQ ID NO: 52209 - DNA, 18 bp, Homo Sapiens
tggtctagtggttaggat

SEQ ID NO: 52210 - DNA, 19 bp, Homo Sapiens
tggtctagtggttaggatt

SEQ ID NO: 52211 - DNA, 20 bp, Homo Sapiens
tggtctagtggttaggattc

SEQ ID NO: 52212 - DNA, 23 bp, Homo Sapiens
tggtctagtggttaggattcggc

SEQ ID NO: 52213 - DNA, 24 bp, Homo Sapiens
tggtctagtggttaggattcggcg

SEQ ID NO: 52214 - DNA, 25 bp, Homo Sapiens
tggtctagtggttaggattcggcgc

SEQ ID NO: 52215 - DNA, 26 bp, Homo Sapiens
tggtctagtggttaggattcggcgct

SEQ ID NO: 52216 - DNA, 27 bp, Homo Sapiens
tggtctagtggttaggattcggcgctc

SEQ ID NO: 52217 - DNA, 30 bp, Homo Sapiens; identical to SEQ ID NO: 28039

SEQ ID NO: 52218 - DNA, 32 bp, Homo Sapiens; identical to SEQ ID NO: 28040

SEQ ID NO: 52219 - DNA, 33 bp, Homo Sapiens; identical to SEQ ID NO: 42186

SEQ ID NO: 52220 - DNA, 35 bp, Homo Sapiens; identical to SEQ ID NO: 28041

SEQ ID NO: 52221 - DNA, 42 bp, Homo Sapiens; identical to SEQ ID NO: 28043

SEQ ID NO: 52222 - DNA, 17 bp, Homo Sapiens
tggtgagcactctggac

SEQ ID NO: 52223 - DNA, 16 bp, Homo Sapiens
tggtgagtatccccgc

SEQ ID NO: 52224 - DNA, 17 bp, Homo Sapiens
tggtgagtatccccgcc

SEQ ID NO: 52225 - DNA, 18 bp, Homo Sapiens
tggtgagtatccccgcct

SEQ ID NO: 52226 - DNA, 21 bp, Homo Sapiens
tggtgagtatccccgcctgtc

SEQ ID NO: 52227 - DNA, 23 bp, Homo Sapiens
tggtgagtatccccgcctgtcac

SEQ ID NO: 52228 - DNA, 24 bp, Homo Sapiens
tggtgagtatccccgcctgtcacg

SEQ ID NO: 52229 - DNA, 25 bp, Homo Sapiens
tggtgagtatccccgcctgtcacgc

SEQ ID NO: 52230 - DNA, 29 bp, Homo Sapiens
tggtgagtatccccgcctgtcacgcggga

SEQ ID NO: 52231 - DNA, 31 bp, Homo Sapiens
tggtgagtatccccgcctgtcacgcgggaga

SEQ ID NO: 52232 - DNA, 38 bp, Homo Sapiens
tggtgagtatccccgcctgtcacgcgggagaccggggt

SEQ ID NO: 52233 - DNA, 24 bp, Homo Sapiens
tggtggagttaaagactttttctc

SEQ ID NO: 52234 - DNA, 28 bp, Homo Sapiens
tggtggagttaaagactttttctctgac

SEQ ID NO: 52235 - DNA, 29 bp, Homo Sapiens
tggtggagttaaagactttttctctgacc

SEQ ID NO: 52236 - DNA, 30 bp, Homo Sapiens; identical to SEQ ID NO: 28095

SEQ ID NO: 52237 - DNA, 17 bp, Homo Sapiens
tggtggtctagtggcta

SEQ ID NO: 52238 - DNA, 21 bp, Homo Sapiens
tggtggtctagtggttaggat

SEQ ID NO: 52239 - DNA, 22 bp, Homo Sapiens
tggtggtctagtggttaggatt

SEQ ID NO: 52240 - DNA, 23 bp, Homo Sapiens
tggtggtctagtggttaggattc

SEQ ID NO: 52241 - DNA, 24 bp, Homo Sapiens
tggtggtctagtggttaggattcg

SEQ ID NO: 52242 - DNA, 26 bp, Homo Sapiens
tggtggtctagtggttaggattcggc

SEQ ID NO: 52243 - DNA, 29 bp, Homo Sapiens
tggtggtctagtggttaggattcggcgct

SEQ ID NO: 52244 - DNA, 30 bp, Homo Sapiens; identical to SEQ ID NO: 28133

SEQ ID NO: 52245 - DNA, 32 bp, Homo Sapiens; identical to SEQ ID NO: 28135

SEQ ID NO: 52246 - DNA, 35 bp, Homo Sapiens; identical to SEQ ID NO: 28138

SEQ ID NO: 52247 - DNA, 38 bp, Homo Sapiens; identical to SEQ ID NO: 28140

SEQ ID NO: 52248 - DNA, 45 bp, Homo Sapiens; identical to SEQ ID NO: 28141

SEQ ID NO: 52249 - DNA, 47 bp, Homo Sapiens; identical to SEQ ID NO: 28142

SEQ ID NO: 52250 - DNA, 16 bp, Homo Sapiens
tggtggttcagtggta

SEQ ID NO: 52251 - DNA, 26 bp, Homo Sapiens
tggtggttcagtggtagaattctcgc

SEQ ID NO: 52252 - DNA, 27 bp, Homo Sapiens
tggtggttcagtggtagaattctcgcc

SEQ ID NO: 52253 - DNA, 28 bp, Homo Sapiens
tggtggttcagtggtagaattctcgcct

SEQ ID NO: 52254 - DNA, 31 bp, Homo Sapiens; identical to SEQ ID NO: 28160

SEQ ID NO: 52255 - DNA, 44 bp, Homo Sapiens; identical to SEQ ID NO: 28162

SEQ ID NO: 52256 - DNA, 28 bp, Homo Sapiens
tggtggttcgagcccacccagggacgcc

SEQ ID NO: 52257 - DNA, 46 bp, Homo Sapiens
tggtgtaatggtgagcactctggactctgaatccagcgatccgagt

SEQ ID NO: 52258 - DNA, 16 bp, Homo Sapiens
tggtgtaatggttagc

SEQ ID NO: 52259 - DNA, 24 bp, Homo Sapiens
tggtgtaatggttagcactctgga

SEQ ID NO: 52260 - DNA, 25 bp, Homo Sapiens
tggtgtaatggttagcactctggac

SEQ ID NO: 52261 - DNA, 26 bp, Homo Sapiens
tggtgtaatggttagcactctggact

SEQ ID NO: 52262 - DNA, 27 bp, Homo Sapiens
tggtgtaatggttagcactctggactc

SEQ ID NO: 52263 - DNA, 31 bp, Homo Sapiens; identical to SEQ ID NO: 28194

SEQ ID NO: 52264 - DNA, 32 bp, Homo Sapiens; identical to SEQ ID NO: 42246

SEQ ID NO: 52265 - DNA, 33 bp, Homo Sapiens; identical to SEQ ID NO: 28195

SEQ ID NO: 52266 - DNA, 34 bp, Homo Sapiens; identical to SEQ ID NO: 28196

SEQ ID NO: 52267 - DNA, 35 bp, Homo Sapiens; identical to SEQ ID NO: 28197

SEQ ID NO: 52268 - DNA, 44 bp, Homo Sapiens; identical to SEQ ID NO: 28198

SEQ ID NO: 52269 - DNA, 45 bp, Homo Sapiens; identical to SEQ ID NO: 28199

SEQ ID NO: 52270 - DNA, 46 bp, Homo Sapiens; identical to SEQ ID NO: 28200

SEQ ID NO: 52271 - DNA, 47 bp, Homo Sapiens; identical to SEQ ID NO: 28201

SEQ ID NO: 52272 - DNA, 33 bp, Homo Sapiens; identical to SEQ ID NO: 28204

SEQ ID NO: 52273 - DNA, 34 bp, Homo Sapiens; identical to SEQ ID NO: 42258

SEQ ID NO: 52274 - DNA, 35 bp, Homo Sapiens; identical to SEQ ID NO: 42259

SEQ ID NO: 52275 - DNA, 18 bp, Homo Sapiens
tggtgtagtggtatcatg

SEQ ID NO: 52276 - DNA, 20 bp, Homo Sapiens
tggtgtagtggtatcatgca

SEQ ID NO: 52277 - DNA, 22 bp, Homo Sapiens
tggtgtagtggtatcatgcaag

SEQ ID NO: 52278 - DNA, 23 bp, Homo Sapiens
tggtgtagtggtatcatgcaaga

SEQ ID NO: 52279 - DNA, 25 bp, Homo Sapiens
tggtgtagtggtatcatgcaagatt

SEQ ID NO: 52280 - DNA, 27 bp, Homo Sapiens
tggtgtagtggtatcatgcaagattcc

SEQ ID NO: 52281 - DNA, 28 bp, Homo Sapiens
tggtgtagtggtatcatgcaagattccc

SEQ ID NO: 52282 - DNA, 32 bp, Homo Sapiens; identical to SEQ ID NO: 28214

SEQ ID NO: 52283 - DNA, 43 bp, Homo Sapiens; identical to SEQ ID NO: 28217

SEQ ID NO: 52284 - DNA, 16 bp, Homo Sapiens
tggttaaggcattgga

SEQ ID NO: 52285 - DNA, 17 bp, Homo Sapiens
tggttaaggcattggac

SEQ ID NO: 52286 - DNA, 20 bp, Homo Sapiens
tggttaaggcattggactta

SEQ ID NO: 52287 - DNA, 16 bp, Homo Sapiens
tggttaaggcgttgga

SEQ ID NO: 52288 - DNA, 17 bp, Homo Sapiens
tggttaaggcgttggac

SEQ ID NO: 52289 - DNA, 16 bp, Homo Sapiens
tggttagcactctgga

SEQ ID NO: 52290 - DNA, 17 bp, Homo Sapiens
tggttagcactctggac

SEQ ID NO: 52291 - DNA, 18 bp, Homo Sapiens
tggttagcactctggact

SEQ ID NO: 52292 - DNA, 23 bp, Homo Sapiens
tggttagcactctggactctgaa

SEQ ID NO: 52293 - DNA, 24 bp, Homo Sapiens
tggttagcactctggactctgaat

SEQ ID NO: 52294 - DNA, 25 bp, Homo Sapiens
tggttagcactctggactctgaatc

SEQ ID NO: 52295 - DNA, 26 bp, Homo Sapiens
tggttagcactctggactctgaatcc

SEQ ID NO: 52296 - DNA, 27 bp, Homo Sapiens
tggttagcactctggactctgaatcca

SEQ ID NO: 52297 - DNA, 38 bp, Homo Sapiens; identical to SEQ ID NO: 28243

SEQ ID NO: 52298 - DNA, 25 bp, Homo Sapiens
tggttagcactctggactttgaatc

SEQ ID NO: 52299 - DNA, 26 bp, Homo Sapiens
tggttagcactctggactttgaatcc

SEQ ID NO: 52300 - DNA, 39 bp, Homo Sapiens
tggttagcactctggactttgaatccagcgatccgagtt

SEQ ID NO: 52301 - DNA, 16 bp, Homo Sapiens
tggttaggattcggcg

SEQ ID NO: 52302 - DNA, 17 bp, Homo Sapiens
tggttaggattcggcgc

SEQ ID NO: 52303 - DNA, 18 bp, Homo Sapiens
tggttaggattcggcgct

SEQ ID NO: 52304 - DNA, 19 bp, Homo Sapiens
tggttaggattcggcgctc

SEQ ID NO: 52305 - DNA, 20 bp, Homo Sapiens
tggttaggattcggcgctct

SEQ ID NO: 52306 - DNA, 21 bp, Homo Sapiens
tggttaggattcggcgctctc

SEQ ID NO: 52307 - DNA, 22 bp, Homo Sapiens
tggttaggattcggcgctctca

SEQ ID NO: 52308 - DNA, 23 bp, Homo Sapiens
tggttaggattcggcgctctcac

SEQ ID NO: 52309 - DNA, 24 bp, Homo Sapiens
tggttaggattcggcgctctcacc

SEQ ID NO: 52310 - DNA, 25 bp, Homo Sapiens
tggttaggattcggcgctctcaccg

SEQ ID NO: 52311 - DNA, 26 bp, Homo Sapiens
tggttaggattcggcgctctcaccgc

SEQ ID NO: 52312 - DNA, 27 bp, Homo Sapiens
tggttaggattcggcgctctcaccgcc

SEQ ID NO: 52313 - DNA, 33 bp, Homo Sapiens; identical to SEQ ID NO: 28279

SEQ ID NO: 52314 - DNA, 34 bp, Homo Sapiens; identical to SEQ ID NO: 28280

SEQ ID NO: 52315 - DNA, 37 bp, Homo Sapiens; identical to SEQ ID NO: 28283

SEQ ID NO: 52316 - DNA, 38 bp, Homo Sapiens; identical to SEQ ID NO: 28284

SEQ ID NO: 52317 - DNA, 39 bp, Homo Sapiens; identical to SEQ ID NO: 28285

SEQ ID NO: 52318 - DNA, 16 bp, Homo Sapiens
tggttagtactctgcg

SEQ ID NO: 52319 - DNA, 17 bp, Homo Sapiens
tggttagtactctgcgt

SEQ ID NO: 52320 - DNA, 18 bp, Homo Sapiens
tggttagtactctgcgtt

SEQ ID NO: 52321 - DNA, 19 bp, Homo Sapiens
tggttagtactctgcgttg

SEQ ID NO: 52322 - DNA, 20 bp, Homo Sapiens
tggttagtactctgcgttgt

SEQ ID NO: 52323 - DNA, 24 bp, Homo Sapiens
tggttagtactctgcgttgtggcc

SEQ ID NO: 52324 - DNA, 27 bp, Homo Sapiens
tggttagtactctgcgttgtggccgca

SEQ ID NO: 52325 - DNA, 29 bp, Homo Sapiens
tggttagtactctgcgttgtggccgcagc

SEQ ID NO: 52326 - DNA, 33 bp, Homo Sapiens; identical to SEQ ID NO: 28298

SEQ ID NO: 52327 - DNA, 34 bp, Homo Sapiens; identical to SEQ ID NO: 28299

SEQ ID NO: 52328 - DNA, 16 bp, Homo Sapiens
tggttagtatccccgc

SEQ ID NO: 52329 - DNA, 23 bp, Homo Sapiens
tggttagtatccccgcctgtcac

SEQ ID NO: 52330 - DNA, 25 bp, Homo Sapiens
tggttatacccttcccgtactacca

SEQ ID NO: 52331 - DNA, 16 bp, Homo Sapiens
tggttatcacgtctgc

SEQ ID NO: 52332 - DNA, 17 bp, Homo Sapiens
tggttatcacgtctgct

SEQ ID NO: 52333 - DNA, 16 bp, Homo Sapiens
tggttatcacgttcgc

SEQ ID NO: 52334 - DNA, 17 bp, Homo Sapiens
tggttatcacgttcgcc

SEQ ID NO: 52335 - DNA, 18 bp, Homo Sapiens
tggttatcacgttcgcct

SEQ ID NO: 52336 - DNA, 19 bp, Homo Sapiens
tggttatcacgttcgcctc

SEQ ID NO: 52337 - DNA, 21 bp, Homo Sapiens
tggttatcacgttcgcctcac

SEQ ID NO: 52338 - DNA, 23 bp, Homo Sapiens
tggttatcacgttcgcctcacac

SEQ ID NO: 52339 - DNA, 28 bp, Homo Sapiens
tggttatcacgttcgcctcacacgcgaa

SEQ ID NO: 52340 - DNA, 19 bp, Homo Sapiens
tggttcaaatccgggtgcc

SEQ ID NO: 52341 - DNA, 20 bp, Homo Sapiens
tggttcaaatccgggtgccc

SEQ ID NO: 52342 - DNA, 16 bp, Homo Sapiens
tggttcagtggtagaa

SEQ ID NO: 52343 - DNA, 19 bp, Homo Sapiens
tggttcagtggtagaattc

SEQ ID NO: 52344 - DNA, 20 bp, Homo Sapiens
tggttcagtggtagaattct

SEQ ID NO: 52345 - DNA, 21 bp, Homo Sapiens
tggttcagtggtagaattctc

SEQ ID NO: 52346 - DNA, 22 bp, Homo Sapiens
tggttcagtggtagaattctcg

SEQ ID NO: 52347 - DNA, 23 bp, Homo Sapiens
tggttcagtggtagaattctcgc

SEQ ID NO: 52348 - DNA, 24 bp, Homo Sapiens
tggttcagtggtagaattctcgcc

SEQ ID NO: 52349 - DNA, 25 bp, Homo Sapiens
tggttcagtggtagaattctcgcct

SEQ ID NO: 52350 - DNA, 26 bp, Homo Sapiens
tggttcagtggtagaattctcgcctg

SEQ ID NO: 52351 - DNA, 27 bp, Homo Sapiens
tggttcagtggtagaattctcgcctgc

SEQ ID NO: 52352 - DNA, 28 bp, Homo Sapiens
tggttcagtggtagaattctcgcctgcc

SEQ ID NO: 52353 - DNA, 29 bp, Homo Sapiens
tggttcagtggtagaattctcgcctgcca

SEQ ID NO: 52354 - DNA, 30 bp, Homo Sapiens; identical to SEQ ID NO: 28340

SEQ ID NO: 52355 - DNA, 31 bp, Homo Sapiens; identical to SEQ ID NO: 28341

SEQ ID NO: 52356 - DNA, 32 bp, Homo Sapiens; identical to SEQ ID NO: 28342

SEQ ID NO: 52357 - DNA, 36 bp, Homo Sapiens; identical to SEQ ID NO: 42370

SEQ ID NO: 52358 - DNA, 40 bp, Homo Sapiens; identical to SEQ ID NO: 28344

SEQ ID NO: 52359 - DNA, 41 bp, Homo Sapiens; identical to SEQ ID NO: 28345

SEQ ID NO: 52360 - DNA, 42 bp, Homo Sapiens; identical to SEQ ID NO: 28346

SEQ ID NO: 52361 - DNA, 43 bp, Homo Sapiens; identical to SEQ ID NO: 28347

SEQ ID NO: 52362 - DNA, 44 bp, Homo Sapiens; identical to SEQ ID NO: 28348

SEQ ID NO: 52363 - DNA, 45 bp, Homo Sapiens; identical to SEQ ID NO: 28349

SEQ ID NO: 52364 - DNA, 24 bp, Homo Sapiens
tggttcgaatccggctcgaaggac

SEQ ID NO: 52365 - DNA, 25 bp, Homo Sapiens
tggttcgaatccggctcgaaggacc

SEQ ID NO: 52366 - DNA, 24 bp, Homo Sapiens
tggttcgaatccggctcggaggac

SEQ ID NO: 52367 - DNA, 25 bp, Homo Sapiens
tggttcgagcccacccagggacgcc

SEQ ID NO: 52368 - DNA, 21 bp, Homo Sapiens
tggttcgatcccgggtttcgg

SEQ ID NO: 52369 - DNA, 24 bp, Homo Sapiens
tggttcgatcccgggtttcggcac

SEQ ID NO: 52370 - DNA, 19 bp, Homo Sapiens
tggttcgattccggctcga

SEQ ID NO: 52371 - DNA, 24 bp, Homo Sapiens
tggttcgattccggctcgaaggac

SEQ ID NO: 52372 - DNA, 25 bp, Homo Sapiens
tggttcgattccggctcgaaggacc

SEQ ID NO: 52373 - DNA, 16 bp, Homo Sapiens
tggttgtagtccgtgc

SEQ ID NO: 52374 - DNA, 20 bp, Homo Sapiens
tggttgtagtccgtgcgaga

SEQ ID NO: 52375 - DNA, 21 bp, Homo Sapiens
tggttgtagtccgtgcgagaa

SEQ ID NO: 52376 - DNA, 22 bp, Homo Sapiens
tggttgtagtccgtgcgagaat

SEQ ID NO: 52377 - DNA, 23 bp, Homo Sapiens
tggttgtagtccgtgcgagaata

SEQ ID NO: 52378 - DNA, 24 bp, Homo Sapiens
tggttgtagtccgtgcgagaatac

SEQ ID NO: 52379 - DNA, 25 bp, Homo Sapiens
tggttgtagtccgtgcgagaatacc

SEQ ID NO: 52380 - DNA, 26 bp, Homo Sapiens
tggttgtagtccgtgcgagaatacca

SEQ ID NO: 52381 - DNA, 25 bp, Homo Sapiens
tggtttagtggtagaattctcgcct

SEQ ID NO: 52382 - DNA, 32 bp, Homo Sapiens
tggtttttcatatcattggtcgtggttgtagt

SEQ ID NO: 52383 - DNA, 36 bp, Homo Sapiens
tggtttttcatatcattggtcgtggttgtagtccgt

SEQ ID NO: 52384 - DNA, 38 bp, Homo Sapiens
tggtttttcatatcattggtcgtggttgtagtccgtgc

SEQ ID NO: 52385 - DNA, 43 bp, Homo Sapiens; identical to SEQ ID NO: 28388

SEQ ID NO: 52386 - DNA, 44 bp, Homo Sapiens; identical to SEQ ID NO: 28389

SEQ ID NO: 52387 - DNA, 45 bp, Homo Sapiens; identical to SEQ ID NO: 28390

SEQ ID NO: 52388 - DNA, 47 bp, Homo Sapiens; identical to SEQ ID NO: 28391

SEQ ID NO: 52389 - DNA, 34 bp, Homo Sapiens; identical to SEQ ID NO: 28407

SEQ ID NO: 52390 - DNA, 37 bp, Homo Sapiens; identical to SEQ ID NO: 28410

SEQ ID NO: 52391 - DNA, 38 bp, Homo Sapiens; identical to SEQ ID NO: 28411

SEQ ID NO: 52392 - DNA, 17 bp, Homo Sapiens
tgtaatggttagcactc

SEQ ID NO: 52393 - DNA, 20 bp, Homo Sapiens
tgtaatggttagcactctgg

SEQ ID NO: 52394 - DNA, 21 bp, Homo Sapiens
tgtaatggttagcactctgga

SEQ ID NO: 52395 - DNA, 22 bp, Homo Sapiens
tgtaatggttagcactctggac

SEQ ID NO: 52396 - DNA, 23 bp, Homo Sapiens
tgtaatggttagcactctggact

SEQ ID NO: 52397 - DNA, 24 bp, Homo Sapiens
tgtaatggttagcactctggactc

SEQ ID NO: 52398 - DNA, 27 bp, Homo Sapiens
tgtaatggttagcactctggactctga

SEQ ID NO: 52399 - DNA, 29 bp, Homo Sapiens
tgtaatggttagcactctggactctgaat

SEQ ID NO: 52400 - DNA, 30 bp, Homo Sapiens; identical to SEQ ID NO: 28440

SEQ ID NO: 52401 - DNA, 32 bp, Homo Sapiens; identical to SEQ ID NO: 28442

SEQ ID NO: 52402 - DNA, 43 bp, Homo Sapiens; identical to SEQ ID NO: 28443

SEQ ID NO: 52403 - DNA, 43 bp, Homo Sapiens; identical to SEQ ID NO: 28453

SEQ ID NO: 52404 - DNA, 20 bp, Homo Sapiens
tgtagcggttatcacattcg

SEQ ID NO: 52405 - DNA, 21 bp, Homo Sapiens
tgtagcggttatcacattcgc

SEQ ID NO: 52406 - DNA, 23 bp, Homo Sapiens
tgtagcggttatcacattcgcct

SEQ ID NO: 52407 - DNA, 16 bp, Homo Sapiens
tgtagtccgtgcgaga

SEQ ID NO: 52408 - DNA, 17 bp, Homo Sapiens
tgtagtccgtgcgagaa

SEQ ID NO: 52409 - DNA, 18 bp, Homo Sapiens
tgtagtccgtgcgagaat

SEQ ID NO: 52410 - DNA, 19 bp, Homo Sapiens
tgtagtccgtgcgagaata

SEQ ID NO: 52411 - DNA, 21 bp, Homo Sapiens
tgtagtccgtgcgagaatacc

SEQ ID NO: 52412 - DNA, 22 bp, Homo Sapiens
tgtagtccgtgcgagaatacca

SEQ ID NO: 52413 - DNA, 21 bp, Homo Sapiens
tgtagtggtcatcacgttcgc

SEQ ID NO: 52414 - DNA, 23 bp, Homo Sapiens
tgtagtggtcatcacgttcgcct

SEQ ID NO: 52415 - DNA, 21 bp, Homo Sapiens
tgtagtggttatcacgtctgc

SEQ ID NO: 52416 - DNA, 21 bp, Homo Sapiens
tgtagtggttatcacgttcgc

SEQ ID NO: 52417 - DNA, 22 bp, Homo Sapiens
tgtagtggttatcacgttcgcc

SEQ ID NO: 52418 - DNA, 23 bp, Homo Sapiens
tgtagtggttatcacgttcgcct

SEQ ID NO: 52419 - DNA, 35 bp, Homo Sapiens; identical to SEQ ID NO: 28530

SEQ ID NO: 52420 - DNA, 36 bp, Homo Sapiens; identical to SEQ ID NO: 28531

SEQ ID NO: 52421 - DNA, 37 bp, Homo Sapiens; identical to SEQ ID NO: 28532

SEQ ID NO: 52422 - DNA, 38 bp, Homo Sapiens; identical to SEQ ID NO: 28533

SEQ ID NO: 52423 - DNA, 39 bp, Homo Sapiens; identical to SEQ ID NO: 28534

SEQ ID NO: 52424 - DNA, 36 bp, Homo Sapiens; identical to SEQ ID NO: 28541

SEQ ID NO: 52425 - DNA, 37 bp, Homo Sapiens; identical to SEQ ID NO: 28542

SEQ ID NO: 52426 - DNA, 38 bp, Homo Sapiens; identical to SEQ ID NO: 28543

SEQ ID NO: 52427 - DNA, 39 bp, Homo Sapiens
tgtatgaggtcccgggttcgatccccggcatctccacca

SEQ ID NO: 52428 - DNA, 16 bp, Homo Sapiens
tgtcacgcgggagacc

SEQ ID NO: 52429 - DNA, 17 bp, Homo Sapiens
tgtcacgcgggagaccg

SEQ ID NO: 52430 - DNA, 21 bp, Homo Sapiens
tgtcacgcgggagaccggggt

SEQ ID NO: 52431 - DNA, 41 bp, Homo Sapiens; identical to SEQ ID NO: 28550

SEQ ID NO: 52432 - DNA, 42 bp, Homo Sapiens; identical to SEQ ID NO: 28551

SEQ ID NO: 52433 - DNA, 37 bp, Homo Sapiens; identical to SEQ ID NO: 28554

SEQ ID NO: 52434 - DNA, 41 bp, Homo Sapiens; identical to SEQ ID NO: 28557

SEQ ID NO: 52435 - DNA, 42 bp, Homo Sapiens; identical to SEQ ID NO: 28558

SEQ ID NO: 52436 - DNA, 43 bp, Homo Sapiens; identical to SEQ ID NO: 28559

SEQ ID NO: 52437 - DNA, 34 bp, Homo Sapiens; identical to SEQ ID NO: 28570

SEQ ID NO: 52438 - DNA, 41 bp, Homo Sapiens; identical to SEQ ID NO: 28601

SEQ ID NO: 52439 - DNA, 42 bp, Homo Sapiens; identical to SEQ ID NO: 28602

SEQ ID NO: 52440 - DNA, 37 bp, Homo Sapiens; identical to SEQ ID NO: 42452

SEQ ID NO: 52441 - DNA, 21 bp, Homo Sapiens
tgtgatggccgagtggttaag

SEQ ID NO: 52442 - DNA, 20 bp, Homo Sapiens
tgtgctttgcacgcgtgggt

SEQ ID NO: 52443 - DNA, 41 bp, Homo Sapiens; identical to SEQ ID NO: 28610

SEQ ID NO: 52444 - DNA, 17 bp, Homo Sapiens
tgtggccgcagcaacct

SEQ ID NO: 52445 - DNA, 28 bp, Homo Sapiens
tgtgggttcgaatcccaccagagtcgcc

SEQ ID NO: 52446 - DNA, 28 bp, Homo Sapiens
tgtgggttcgagtcccaccagagtcgcc

SEQ ID NO: 52447 - DNA, 26 bp, Homo Sapiens
tgtgggttcgagtcccatctggggtg

SEQ ID NO: 52448 - DNA, 27 bp, Homo Sapiens
tgtgggttcgagtcccatctgggtcgc

SEQ ID NO: 52449 - DNA, 28 bp, Homo Sapiens
tgtgggttcgagtcccatctgggtcgcc

SEQ ID NO: 52450 - DNA, 27 bp, Homo Sapiens
tgtgggtttaagtcccattggtctagc

SEQ ID NO: 52451 - DNA, 28 bp, Homo Sapiens
tgtgggtttaagtcccattggtctagcc

SEQ ID NO: 52452 - DNA, 24 bp, Homo Sapiens
tgttcaaatcacgtcggggtcacc

SEQ ID NO: 52453 - DNA, 24 bp, Homo Sapiens
tgttcaagtcacgtcggggtcacc

SEQ ID NO: 52454 - DNA, 24 bp, Homo Sapiens
tgttcgaatcacgtcggggtcacc

SEQ ID NO: 52455 - DNA, 25 bp, Homo Sapiens
tgttggttatacccttcccgtacta

SEQ ID NO: 52456 - DNA, 26 bp, Homo Sapiens
tgttggttatacccttcccgtactac

SEQ ID NO: 52457 - DNA, 27 bp, Homo Sapiens
tgttggttatacccttcccgtactacc

SEQ ID NO: 52458 - DNA, 28 bp, Homo Sapiens
tgttggttatacccttcccgtactacca

SEQ ID NO: 52459 - DNA, 16 bp, Homo Sapiens
tgtttagacgggctca

SEQ ID NO: 52460 - DNA, 17 bp, Homo Sapiens
tgtttagacgggctcac

SEQ ID NO: 52461 - DNA, 23 bp, Homo Sapiens
tgtttagacgggctcacatcacc

SEQ ID NO: 52462 - DNA, 24 bp, Homo Sapiens
tgtttagacgggctcacatcaccc

SEQ ID NO: 52463 - DNA, 27 bp, Homo Sapiens
tgtttagacgggctcacatcaccccat

SEQ ID NO: 52464 - DNA, 30 bp, Homo Sapiens; identical to SEQ ID NO: 28691

SEQ ID NO: 52465 - DNA, 34 bp, Homo Sapiens; identical to SEQ ID NO: 28695

SEQ ID NO: 52466 - DNA, 31 bp, Homo Sapiens; identical to SEQ ID NO: 28706

SEQ ID NO: 52467 - DNA, 32 bp, Homo Sapiens; identical to SEQ ID NO: 28707

SEQ ID NO: 52468 - DNA, 33 bp, Homo Sapiens; identical to SEQ ID NO: 28708

SEQ ID NO: 52469 - DNA, 16 bp, Homo Sapiens
ttaaagactttttctc

SEQ ID NO: 52470 - DNA, 19 bp, Homo Sapiens
ttaaagactttttctctga

SEQ ID NO: 52471 - DNA, 20 bp, Homo Sapiens
ttaaagactttttctctgac

SEQ ID NO: 52472 - DNA, 21 bp, Homo Sapiens
ttaaagactttttctctgacc

SEQ ID NO: 52473 - DNA, 22 bp, Homo Sapiens
ttaaagactttttctctgacca

SEQ ID NO: 52474 - DNA, 18 bp, Homo Sapiens
ttaaagattaagagaacc

SEQ ID NO: 52475 - DNA, 36 bp, Homo Sapiens; identical to SEQ ID NO: 28753

SEQ ID NO: 52476 - DNA, 38 bp, Homo Sapiens; identical to SEQ ID NO: 28755

SEQ ID NO: 52477 - DNA, 39 bp, Homo Sapiens; identical to SEQ ID NO: 28756

SEQ ID NO: 52478 - DNA, 18 bp, Homo Sapiens
ttaaagtggctgatttgc

SEQ ID NO: 52479 - DNA, 19 bp, Homo Sapiens
ttaaatacagaccaagagc

SEQ ID NO: 52480 - DNA, 18 bp, Homo Sapiens
ttaacacaaagcacccaa

SEQ ID NO: 52481 - DNA, 26 bp, Homo Sapiens
ttaaccaaaacatcagattgtgaatc

SEQ ID NO: 52482 - DNA, 21 bp, Homo Sapiens
ttaaccgaaaggttggtggtt

SEQ ID NO: 52483 - DNA, 22 bp, Homo Sapiens
ttaaccgaaaggttggtggttc

SEQ ID NO: 52484 - DNA, 23 bp, Homo Sapiens
ttaaccgaaaggttggtggttcg

SEQ ID NO: 52485 - DNA, 24 bp, Homo Sapiens
ttaaccgaaaggttggtggttcga

SEQ ID NO: 52486 - DNA, 26 bp, Homo Sapiens
ttaaccgaaaggttggtggttcgagc

SEQ ID NO: 52487 - DNA, 37 bp, Homo Sapiens; identical to SEQ ID NO: 28873

SEQ ID NO: 52488 - DNA, 38 bp, Homo Sapiens; identical to SEQ ID NO: 28874

SEQ ID NO: 52489 - DNA, 39 bp, Homo Sapiens; identical to SEQ ID NO: 28875

SEQ ID NO: 52490 - DNA, 40 bp, Homo Sapiens; identical to SEQ ID NO: 28876

SEQ ID NO: 52491 - DNA, 41 bp, Homo Sapiens; identical to SEQ ID NO: 28877

SEQ ID NO: 52492 - DNA, 42 bp, Homo Sapiens; identical to SEQ ID NO: 28878

SEQ ID NO: 52493 - DNA, 41 bp, Homo Sapiens; identical to SEQ ID NO: 28879

SEQ ID NO: 52494 - DNA, 19 bp, Homo Sapiens
ttaactaagtgtttgtggg

SEQ ID NO: 52495 - DNA, 32 bp, Homo Sapiens; identical to SEQ ID NO: 28902

SEQ ID NO: 52496 - DNA, 36 bp, Homo Sapiens; identical to SEQ ID NO: 28906

SEQ ID NO: 52497 - DNA, 37 bp, Homo Sapiens; identical to SEQ ID NO: 28907

SEQ ID NO: 52498 - DNA, 38 bp, Homo Sapiens; identical to SEQ ID NO: 28908

SEQ ID NO: 52499 - DNA, 39 bp, Homo Sapiens; identical to SEQ ID NO: 28909

SEQ ID NO: 52500 - DNA, 40 bp, Homo Sapiens; identical to SEQ ID NO: 28910

SEQ ID NO: 52501 - DNA, 41 bp, Homo Sapiens; identical to SEQ ID NO: 28911

SEQ ID NO: 52502 - DNA, 42 bp, Homo Sapiens; identical to SEQ ID NO: 28912

SEQ ID NO: 52503 - DNA, 26 bp, Homo Sapiens
ttaacttccaattaactagttttgac

SEQ ID NO: 52504 - DNA, 17 bp, Homo Sapiens
ttaacttgaccgctctg

SEQ ID NO: 52505 - DNA, 18 bp, Homo Sapiens
ttaacttgaccgctctga

SEQ ID NO: 52506 - DNA, 19 bp, Homo Sapiens
ttaacttgaccgctctgac

SEQ ID NO: 52507 - DNA, 20 bp, Homo Sapiens
ttaacttgaccgctctgacc

SEQ ID NO: 52508 - DNA, 21 bp, Homo Sapiens
ttaacttgaccgctctgacca

SEQ ID NO: 52509 - DNA, 30 bp, Homo Sapiens; identical to SEQ ID NO: 28943

SEQ ID NO: 52510 - DNA, 31 bp, Homo Sapiens; identical to SEQ ID NO: 28944

SEQ ID NO: 52511 - DNA, 32 bp, Homo Sapiens; identical to SEQ ID NO: 28945

SEQ ID NO: 52512 - DNA, 20 bp, Homo Sapiens
ttaagtcccattggtctagc

SEQ ID NO: 52513 - DNA, 21 bp, Homo Sapiens
ttaagtcccattggtctagcc

SEQ ID NO: 52514 - DNA, 23 bp, Homo Sapiens
ttaagttaaagattaagagaacc

SEQ ID NO: 52515 - DNA, 29 bp, Homo Sapiens
ttaagttaaagattaagagaaccaacacc

SEQ ID NO: 52516 - DNA, 41 bp, Homo Sapiens; identical to SEQ ID NO: 28999

SEQ ID NO: 52517 - DNA, 42 bp, Homo Sapiens; identical to SEQ ID NO: 29000

SEQ ID NO: 52518 - DNA, 43 bp, Homo Sapiens; identical to SEQ ID NO: 29001

SEQ ID NO: 52519 - DNA, 44 bp, Homo Sapiens; identical to SEQ ID NO: 29002

SEQ ID NO: 52520 - DNA, 16 bp, Homo Sapiens
ttaatcccagggtcgt

SEQ ID NO: 52521 - DNA, 37 bp, Homo Sapiens
ttaatctcagggtcgtgggttcgagccccacgttggg

SEQ ID NO: 52522 - DNA, 24 bp, Homo Sapiens
ttaatctgagggtccagggttcaa

SEQ ID NO: 52523 - DNA, 41 bp, Homo Sapiens; identical to SEQ ID NO: 29026

SEQ ID NO: 52524 - DNA, 42 bp, Homo Sapiens; identical to SEQ ID NO: 29027

SEQ ID NO: 52525 - DNA, 18 bp, Homo Sapiens
ttaattaaagtggctgat

SEQ ID NO: 52526 - DNA, 19 bp, Homo Sapiens
ttacacgcagaaggtcctg

SEQ ID NO: 52527 - DNA, 43 bp, Homo Sapiens; identical to SEQ ID NO: 29038

SEQ ID NO: 52528 - DNA, 30 bp, Homo Sapiens; identical to SEQ ID NO: 29053

SEQ ID NO: 52529 - DNA, 38 bp, Homo Sapiens; identical to SEQ ID NO: 29061

SEQ ID NO: 52530 - DNA, 39 bp, Homo Sapiens; identical to SEQ ID NO: 29062

SEQ ID NO: 52531 - DNA, 40 bp, Homo Sapiens; identical to SEQ ID NO: 29063

SEQ ID NO: 52532 - DNA, 41 bp, Homo Sapiens; identical to SEQ ID NO: 29064

SEQ ID NO: 52533 - DNA, 42 bp, Homo Sapiens; identical to SEQ ID NO: 29065

SEQ ID NO: 52534 - DNA, 21 bp, Homo Sapiens
ttacgaccccttatttacccc

SEQ ID NO: 52535 - DNA, 42 bp, Homo Sapiens; identical to SEQ ID NO: 29121

SEQ ID NO: 52536 - DNA, 20 bp, Homo Sapiens
ttagacgggctcacatcacc

SEQ ID NO: 52537 - DNA, 21 bp, Homo Sapiens
ttagacgggctcacatcaccc

SEQ ID NO: 52538 - DNA, 26 bp, Homo Sapiens
ttagacgggctcacatcaccccataa

SEQ ID NO: 52539 - DNA, 29 bp, Homo Sapiens
ttagacgggctcacatcaccccataaaca

SEQ ID NO: 52540 - DNA, 31 bp, Homo Sapiens; identical to SEQ ID NO: 29141

SEQ ID NO: 52541 - DNA, 32 bp, Homo Sapiens; identical to SEQ ID NO: 29142

SEQ ID NO: 52542 - DNA, 16 bp, Homo Sapiens
ttagcactctggactc

SEQ ID NO: 52543 - DNA, 19 bp, Homo Sapiens
ttagcactctggactctga

SEQ ID NO: 52544 - DNA, 20 bp, Homo Sapiens
ttagcactctggactctgaa

SEQ ID NO: 52545 - DNA, 21 bp, Homo Sapiens
ttagcactctggactctgaat

SEQ ID NO: 52546 - DNA, 22 bp, Homo Sapiens
ttagcactctggactctgaatc

SEQ ID NO: 52547 - DNA, 23 bp, Homo Sapiens
ttagcactctggactctgaatcc

SEQ ID NO: 52548 - DNA, 24 bp, Homo Sapiens
ttagcactctggactctgaatcca

SEQ ID NO: 52549 - DNA, 26 bp, Homo Sapiens
ttagcactctggactctgaatccagc

SEQ ID NO: 52550 - DNA, 27 bp, Homo Sapiens
ttagcactctggactctgaatccagcg

SEQ ID NO: 52551 - DNA, 34 bp, Homo Sapiens; identical to SEQ ID NO: 29169

SEQ ID NO: 52552 - DNA, 35 bp, Homo Sapiens; identical to SEQ ID NO: 29170

SEQ ID NO: 52553 - DNA, 38 bp, Homo Sapiens; identical to SEQ ID NO: 29173

SEQ ID NO: 52554 - DNA, 46 bp, Homo Sapiens; identical to SEQ ID NO: 29176

SEQ ID NO: 52555 - DNA, 19 bp, Homo Sapiens
ttagcactctggactttga

SEQ ID NO: 52556 - DNA, 20 bp, Homo Sapiens
ttagcactctggactttgaa

SEQ ID NO: 52557 - DNA, 22 bp, Homo Sapiens
ttagcactctggactttgaatc

SEQ ID NO: 52558 - DNA, 23 bp, Homo Sapiens
ttagcactctggactttgaatcc

SEQ ID NO: 52559 - DNA, 47 bp, Homo Sapiens; identical to SEQ ID NO: 29230

SEQ ID NO: 52560 - DNA, 44 bp, Homo Sapiens; identical to SEQ ID NO: 29243

SEQ ID NO: 52561 - DNA, 45 bp, Homo Sapiens; identical to SEQ ID NO: 29244

SEQ ID NO: 52562 - DNA, 46 bp, Homo Sapiens; identical to SEQ ID NO: 29245

SEQ ID NO: 52563 - DNA, 32 bp, Homo Sapiens; identical to SEQ ID NO: 29262

SEQ ID NO: 52564 - DNA, 33 bp, Homo Sapiens; identical to SEQ ID NO: 29263

SEQ ID NO: 52565 - DNA, 34 bp, Homo Sapiens; identical to SEQ ID NO: 29264

SEQ ID NO: 52566 - DNA, 35 bp, Homo Sapiens; identical to SEQ ID NO: 29265

SEQ ID NO: 52567 - DNA, 36 bp, Homo Sapiens; identical to SEQ ID NO: 29266

SEQ ID NO: 52568 - DNA, 30 bp, Homo Sapiens
ttaggattcctggttttcacccaggcggcc

SEQ ID NO: 52569 - DNA, 42 bp, Homo Sapiens; identical to SEQ ID NO: 29275

SEQ ID NO: 52570 - DNA, 16 bp, Homo Sapiens
ttaggattcggcgctc

SEQ ID NO: 52571 - DNA, 17 bp, Homo Sapiens
ttaggattcggcgctct

SEQ ID NO: 52572 - DNA, 18 bp, Homo Sapiens
ttaggattcggcgctctc

SEQ ID NO: 52573 - DNA, 21 bp, Homo Sapiens
ttaggattcggcgctctcacc

SEQ ID NO: 52574 - DNA, 22 bp, Homo Sapiens
ttaggattcggcgctctcaccg

SEQ ID NO: 52575 - DNA, 24 bp, Homo Sapiens
ttaggattcggcgctctcaccgcc

SEQ ID NO: 52576 - DNA, 30 bp, Homo Sapiens; identical to SEQ ID NO: 29291

SEQ ID NO: 52577 - DNA, 34 bp, Homo Sapiens; identical to SEQ ID NO: 29295

SEQ ID NO: 52578 - DNA, 37 bp, Homo Sapiens; identical to SEQ ID NO: 29298

SEQ ID NO: 52579 - DNA, 20 bp, Homo Sapiens
ttaggcctctttttaccacc

SEQ ID NO: 52580 - DNA, 33 bp, Homo Sapiens; identical to SEQ ID NO: 29341

SEQ ID NO: 52581 - DNA, 34 bp, Homo Sapiens; identical to SEQ ID NO: 29342

SEQ ID NO: 52582 - DNA, 35 bp, Homo Sapiens; identical to SEQ ID NO: 29343

SEQ ID NO: 52583 - DNA, 34 bp, Homo Sapiens; identical to SEQ ID NO: 29352

SEQ ID NO: 52584 - DNA, 35 bp, Homo Sapiens; identical to SEQ ID NO: 29353

SEQ ID NO: 52585 - DNA, 31 bp, Homo Sapiens; identical to SEQ ID NO: 29365

SEQ ID NO: 52586 - DNA, 19 bp, Homo Sapiens
ttagtggtagaattctcgc

SEQ ID NO: 52587 - DNA, 20 bp, Homo Sapiens
ttagtggtagaattctcgcc

SEQ ID NO: 52588 - DNA, 21 bp, Homo Sapiens
ttagtggtagaattctcgcct

SEQ ID NO: 52589 - DNA, 19 bp, Homo Sapiens
ttatacccttcccgtacta

SEQ ID NO: 52590 - DNA, 21 bp, Homo Sapiens
ttatacccttcccgtactacc

SEQ ID NO: 52591 - DNA, 22 bp, Homo Sapiens
ttatacccttcccgtactacca

SEQ ID NO: 52592 - DNA, 17 bp, Homo Sapiens
ttcaaacctgccggggc

SEQ ID NO: 52593 - DNA, 18 bp, Homo Sapiens
ttcaaacctgccggggct

SEQ ID NO: 52594 - DNA, 19 bp, Homo Sapiens
ttcaaacctgccggggctt

SEQ ID NO: 52595 - DNA, 21 bp, Homo Sapiens
ttcaaacctgccggggcttcc

SEQ ID NO: 52596 - DNA, 34 bp, Homo Sapiens; identical to SEQ ID NO: 29429

SEQ ID NO: 52597 - DNA, 36 bp, Homo Sapiens; identical to SEQ ID NO: 29431

SEQ ID NO: 52598 - DNA, 37 bp, Homo Sapiens; identical to SEQ ID NO: 29432

SEQ ID NO: 52599 - DNA, 38 bp, Homo Sapiens; identical to SEQ ID NO: 29433

SEQ ID NO: 52600 - DNA, 36 bp, Homo Sapiens; identical to SEQ ID NO: 42660

SEQ ID NO: 52601 - DNA, 37 bp, Homo Sapiens; identical to SEQ ID NO: 29434

SEQ ID NO: 52602 - DNA, 38 bp, Homo Sapiens; identical to SEQ ID NO: 29435

SEQ ID NO: 52603 - DNA, 36 bp, Homo Sapiens; identical to SEQ ID NO: 42665

SEQ ID NO: 52604 - DNA, 37 bp, Homo Sapiens; identical to SEQ ID NO: 29436

SEQ ID NO: 52605 - DNA, 38 bp, Homo Sapiens; identical to SEQ ID NO: 29437

SEQ ID NO: 52606 - DNA, 22 bp, Homo Sapiens
ttcaaatcacgtcggggtcacc

SEQ ID NO: 52607 - DNA, 23 bp, Homo Sapiens
ttcaaatcacgtcggggtcacca

SEQ ID NO: 52608 - DNA, 17 bp, Homo Sapiens
ttcaaatcccggacgag

SEQ ID NO: 52609 - DNA, 18 bp, Homo Sapiens
ttcaaatcccggacgagc

SEQ ID NO: 52610 - DNA, 19 bp, Homo Sapiens
ttcaaatcccggacgagcc

SEQ ID NO: 52611 - DNA, 20 bp, Homo Sapiens
ttcaaatcccggacgagccc

SEQ ID NO: 52612 - DNA, 21 bp, Homo Sapiens
ttcaaatcccggacgagcccc

SEQ ID NO: 52613 - DNA, 22 bp, Homo Sapiens
ttcaaatcccggacgagccccc

SEQ ID NO: 52614 - DNA, 23 bp, Homo Sapiens
ttcaaatcccggacgagccccca

SEQ ID NO: 52615 - DNA, 20 bp, Homo Sapiens
ttcaaatctcgctggggcct

SEQ ID NO: 52616 - DNA, 21 bp, Homo Sapiens
ttcaaatctcgctggggcctc

SEQ ID NO: 52617 - DNA, 17 bp, Homo Sapiens
ttcaaatctcggtggaa

SEQ ID NO: 52618 - DNA, 19 bp, Homo Sapiens
ttcaaatctcggtggaacc

SEQ ID NO: 52619 - DNA, 20 bp, Homo Sapiens
ttcaaatctcggtggaacct

SEQ ID NO: 52620 - DNA, 21 bp, Homo Sapiens
ttcaaatctcggtggaacctc

SEQ ID NO: 52621 - DNA, 22 bp, Homo Sapiens
ttcaaatctcggtggaacctcc

SEQ ID NO: 52622 - DNA, 23 bp, Homo Sapiens
ttcaaatctcggtggaacctcca

SEQ ID NO: 52623 - DNA, 17 bp, Homo Sapiens
ttcaaatctcggtggga

SEQ ID NO: 52624 - DNA, 20 bp, Homo Sapiens
ttcaaatctcggtgggacct

SEQ ID NO: 52625 - DNA, 21 bp, Homo Sapiens
ttcaaatctcggtgggacctc

SEQ ID NO: 52626 - DNA, 22 bp, Homo Sapiens
ttcaaatctcggtgggacctcc

SEQ ID NO: 52627 - DNA, 23 bp, Homo Sapiens
ttcaacttaacttgaccgctctg

SEQ ID NO: 52628 - DNA, 24 bp, Homo Sapiens
ttcaacttaacttgaccgctctga

SEQ ID NO: 52629 - DNA, 25 bp, Homo Sapiens
ttcaacttaacttgaccgctctgac

SEQ ID NO: 52630 - DNA, 26 bp, Homo Sapiens
ttcaacttaacttgaccgctctgacc

SEQ ID NO: 52631 - DNA, 27 bp, Homo Sapiens
ttcaacttaacttgaccgctctgacca

SEQ ID NO: 52632 - DNA, 20 bp, Homo Sapiens
ttcaagtcacgtcggggtca

SEQ ID NO: 52633 - DNA, 22 bp, Homo Sapiens
ttcaagtcacgtcggggtcacc

SEQ ID NO: 52634 - DNA, 23 bp, Homo Sapiens
ttcaagtcacgtcggggtcacca

SEQ ID NO: 52635 - DNA, 19 bp, Homo Sapiens
ttcaagtccctgttcgggc

SEQ ID NO: 52636 - DNA, 20 bp, Homo Sapiens
ttcaagtccctgttcgggcg

SEQ ID NO: 52637 - DNA, 20 bp, Homo Sapiens
ttcaagtctcggtggaacct

SEQ ID NO: 52638 - DNA, 22 bp, Homo Sapiens
ttcaatccccggcacctccacc

SEQ ID NO: 52639 - DNA, 23 bp, Homo Sapiens
ttcaatccccggcacctccacca

SEQ ID NO: 52640 - DNA, 39 bp, Homo Sapiens; identical to SEQ ID NO: 29495

SEQ ID NO: 52641 - DNA, 40 bp, Homo Sapiens; identical to SEQ ID NO: 29496

SEQ ID NO: 52642 - DNA, 42 bp, Homo Sapiens; identical to SEQ ID NO: 29498

SEQ ID NO: 52643 - DNA, 16 bp, Homo Sapiens
ttcaggtcgcagtctc

SEQ ID NO: 52644 - DNA, 17 bp, Homo Sapiens
ttcaggtcgcagtctcc

SEQ ID NO: 52645 - DNA, 18 bp, Homo Sapiens
ttcaggtcgcagtctccc

SEQ ID NO: 52646 - DNA, 19 bp, Homo Sapiens
ttcaggtcgcagtctcccc

SEQ ID NO: 52647 - DNA, 19 bp, Homo Sapiens
ttcagtggtagaattctcg

SEQ ID NO: 52648 - DNA, 20 bp, Homo Sapiens
ttcagtggtagaattctcgc

SEQ ID NO: 52649 - DNA, 21 bp, Homo Sapiens
ttcagtggtagaattctcgcc

SEQ ID NO: 52650 - DNA, 22 bp, Homo Sapiens
ttcagtggtagaattctcgcct

SEQ ID NO: 52651 - DNA, 23 bp, Homo Sapiens
ttcagtggtagaattctcgcctg

SEQ ID NO: 52652 - DNA, 24 bp, Homo Sapiens
ttcagtggtagaattctcgcctgc

SEQ ID NO: 52653 - DNA, 25 bp, Homo Sapiens
ttcagtggtagaattctcgcctgcc

SEQ ID NO: 52654 - DNA, 26 bp, Homo Sapiens
ttcagtggtagaattctcgcctgcca

SEQ ID NO: 52655 - DNA, 29 bp, Homo Sapiens
ttcagtggtagaattctcgcctgccacgc

SEQ ID NO: 52656 - DNA, 33 bp, Homo Sapiens; identical to SEQ ID NO: 29526

SEQ ID NO: 52657 - DNA, 38 bp, Homo Sapiens; identical to SEQ ID NO: 29527

SEQ ID NO: 52658 - DNA, 41 bp, Homo Sapiens; identical to SEQ ID NO: 29530

SEQ ID NO: 52659 - DNA, 42 bp, Homo Sapiens; identical to SEQ ID NO: 29531

SEQ ID NO: 52660 - DNA, 43 bp, Homo Sapiens
ttcagtggtagaattctcgcctgccacgcgggaggcccgggtt

SEQ ID NO: 52661 - DNA, 20 bp, Homo Sapiens
ttcagtggtagaattcttgc

SEQ ID NO: 52662 - DNA, 31 bp, Homo Sapiens; identical to SEQ ID NO: 29546

SEQ ID NO: 52663 - DNA, 33 bp, Homo Sapiens; identical to SEQ ID NO: 29548

SEQ ID NO: 52664 - DNA, 32 bp, Homo Sapiens; identical to SEQ ID NO: 29556

SEQ ID NO: 52665 - DNA, 33 bp, Homo Sapiens; identical to SEQ ID NO: 29574

SEQ ID NO: 52666 - DNA, 34 bp, Homo Sapiens; identical to SEQ ID NO: 29575

SEQ ID NO: 52667 - DNA, 35 bp, Homo Sapiens; identical to SEQ ID NO: 29576

SEQ ID NO: 52668 - DNA, 36 bp, Homo Sapiens; identical to SEQ ID NO: 29577

SEQ ID NO: 52669 - DNA, 37 bp, Homo Sapiens; identical to SEQ ID NO: 29578

SEQ ID NO: 52670 - DNA, 38 bp, Homo Sapiens; identical to SEQ ID NO: 29579

SEQ ID NO: 52671 - DNA, 39 bp, Homo Sapiens; identical to SEQ ID NO: 29580

SEQ ID NO: 52672 - DNA, 41 bp, Homo Sapiens; identical to SEQ ID NO: 29582

SEQ ID NO: 52673 - DNA, 42 bp, Homo Sapiens; identical to SEQ ID NO: 29583

SEQ ID NO: 52674 - DNA, 18 bp, Homo Sapiens
ttccaagcagttgacccg

SEQ ID NO: 52675 - DNA, 19 bp, Homo Sapiens
ttccaagcagttgacccgg

SEQ ID NO: 52676 - DNA, 37 bp, Homo Sapiens; identical to SEQ ID NO: 29594

SEQ ID NO: 52677 - DNA, 42 bp, Homo Sapiens; identical to SEQ ID NO: 29597

SEQ ID NO: 52678 - DNA, 16 bp, Homo Sapiens
ttccagctcgaaggac

SEQ ID NO: 52679 - DNA, 29 bp, Homo Sapiens
ttccaggttcgactcctggctggctcgcc

SEQ ID NO: 52680 - DNA, 31 bp, Homo Sapiens; identical to SEQ ID NO: 29645

SEQ ID NO: 52681 - DNA, 31 bp, Homo Sapiens; identical to SEQ ID NO: 29658

SEQ ID NO: 52682 - DNA, 19 bp, Homo Sapiens
ttcccattcttgcgacccg

SEQ ID NO: 52683 - DNA, 21 bp, Homo Sapiens
ttcccattcttgcgacccggg

SEQ ID NO: 52684 - DNA, 22 bp, Homo Sapiens
ttcccattcttgcgacccgggt

SEQ ID NO: 52685 - DNA, 16 bp, Homo Sapiens
ttccccgacggggagc

SEQ ID NO: 52686 - DNA, 20 bp, Homo Sapiens
ttccccgcacaggttcgaat

SEQ ID NO: 52687 - DNA, 22 bp, Homo Sapiens
ttccccgcacaggttcgaatcc

SEQ ID NO: 52688 - DNA, 23 bp, Homo Sapiens
ttccccgcacaggttcgaatcct

SEQ ID NO: 52689 - DNA, 16 bp, Homo Sapiens
ttcccggccaacgcac

SEQ ID NO: 52690 - DNA, 17 bp, Homo Sapiens
ttcccggccaacgcacc

SEQ ID NO: 52691 - DNA, 18 bp, Homo Sapiens
ttcccggccaacgcacca

SEQ ID NO: 52692 - DNA, 16 bp, Homo Sapiens
ttcccggccaatgcac

SEQ ID NO: 52693 - DNA, 17 bp, Homo Sapiens
ttcccggccaatgcacc

SEQ ID NO: 52694 - DNA, 18 bp, Homo Sapiens
ttcccggccaatgcacca

SEQ ID NO: 52695 - DNA, 18 bp, Homo Sapiens
ttcccggccagtgcacca

SEQ ID NO: 52696 - DNA, 17 bp, Homo Sapiens
ttcccggcccatgcacc

SEQ ID NO: 52697 - DNA, 18 bp, Homo Sapiens
ttcccggcccatgcacca

SEQ ID NO: 52698 - DNA, 16 bp, Homo Sapiens
ttcccgggcggcgcac

SEQ ID NO: 52699 - DNA, 17 bp, Homo Sapiens
ttcccgggcggcgcacc

SEQ ID NO: 52700 - DNA, 18 bp, Homo Sapiens
ttcccgggcggcgcacca

SEQ ID NO: 52701 - DNA, 16 bp, Homo Sapiens
ttcccggtcagggaac

SEQ ID NO: 52702 - DNA, 17 bp, Homo Sapiens
ttcccggtcagggaacc

SEQ ID NO: 52703 - DNA, 19 bp, Homo Sapiens
ttccggatcagaagattga

SEQ ID NO: 52704 - DNA, 20 bp, Homo Sapiens
ttccggatcagaagattgag

SEQ ID NO: 52705 - DNA, 23 bp, Homo Sapiens
ttccggatcagaagattgagggt

SEQ ID NO: 52706 - DNA, 24 bp, Homo Sapiens
ttccggatcagaagattgagggtt

SEQ ID NO: 52707 - DNA, 33 bp, Homo Sapiens; identical to SEQ ID NO: 29741

SEQ ID NO: 52708 - DNA, 16 bp, Homo Sapiens
ttccggctcgaaggac

SEQ ID NO: 52709 - DNA, 17 bp, Homo Sapiens
ttccggctcgaaggacc

SEQ ID NO: 52710 - DNA, 18 bp, Homo Sapiens
ttccggctcgaaggacca

SEQ ID NO: 52711 - DNA, 23 bp, Homo Sapiens
ttccgggttcgagtcccggcgga

SEQ ID NO: 52712 - DNA, 26 bp, Homo Sapiens
ttccgggttcgagtcccggcggagtc

SEQ ID NO: 52713 - DNA, 28 bp, Homo Sapiens
ttccgggttcgagtcccggcggagtcgc

SEQ ID NO: 52714 - DNA, 29 bp, Homo Sapiens
ttccgggttcgagtcccggcggagtcgcc

SEQ ID NO: 52715 - DNA, 30 bp, Homo Sapiens; identical to SEQ ID NO: 29758

SEQ ID NO: 52716 - DNA, 31 bp, Homo Sapiens; identical to SEQ ID NO: 29766

SEQ ID NO: 52717 - DNA, 21 bp, Homo Sapiens
ttccgtagtgtagtggtcatc

SEQ ID NO: 52718 - DNA, 30 bp, Homo Sapiens; identical to SEQ ID NO: 29780

SEQ ID NO: 52719 - DNA, 31 bp, Homo Sapiens; identical to SEQ ID NO: 29781

SEQ ID NO: 52720 - DNA, 21 bp, Homo Sapiens
ttccgtagtgtagtggttatc

SEQ ID NO: 52721 - DNA, 29 bp, Homo Sapiens
ttccgtagtgtagtggttatcacgttcgc

SEQ ID NO: 52722 - DNA, 30 bp, Homo Sapiens; identical to SEQ ID NO: 29794

SEQ ID NO: 52723 - DNA, 31 bp, Homo Sapiens; identical to SEQ ID NO: 29795

SEQ ID NO: 52724 - DNA, 32 bp, Homo Sapiens; identical to SEQ ID NO: 29799

SEQ ID NO: 52725 - DNA, 35 bp, Homo Sapiens; identical to SEQ ID NO: 29802

SEQ ID NO: 52726 - DNA, 17 bp, Homo Sapiens
ttcctggtcagggaacc

SEQ ID NO: 52727 - DNA, 20 bp, Homo Sapiens
ttcgaaaccgggcggaaaca

SEQ ID NO: 52728 - DNA, 21 bp, Homo Sapiens
ttcgaaaccgggcggaaacac

SEQ ID NO: 52729 - DNA, 22 bp, Homo Sapiens
ttcgaaaccgggcggaaacacc

SEQ ID NO: 52730 - DNA, 23 bp, Homo Sapiens
ttcgaaaccgggcggaaacacca

SEQ ID NO: 52731 - DNA, 23 bp, Homo Sapiens
ttcgaaccccgtccgtgcctcca

SEQ ID NO: 52732 - DNA, 32 bp, Homo Sapiens; identical to SEQ ID NO: 29841

SEQ ID NO: 52733 - DNA, 33 bp, Homo Sapiens; identical to SEQ ID NO: 29842

SEQ ID NO: 52734 - DNA, 34 bp, Homo Sapiens; identical to SEQ ID NO: 29843

SEQ ID NO: 52735 - DNA, 36 bp, Homo Sapiens; identical to SEQ ID NO: 29845

SEQ ID NO: 52736 - DNA, 22 bp, Homo Sapiens
ttcgaatcacgtcggggtcacc

SEQ ID NO: 52737 - DNA, 22 bp, Homo Sapiens
ttcgaatcccaccgctgccacc

SEQ ID NO: 52738 - DNA, 20 bp, Homo Sapiens
ttcgaatcccactcctgaca

SEQ ID NO: 52739 - DNA, 22 bp, Homo Sapiens
ttcgaatcccacttctgacacc

SEQ ID NO: 52740 - DNA, 17 bp, Homo Sapiens
ttcgaatcccagcggtg

SEQ ID NO: 52741 - DNA, 21 bp, Homo Sapiens
ttcgaatcccagcggtgcctc

SEQ ID NO: 52742 - DNA, 22 bp, Homo Sapiens
ttcgaatcccagcggtgcctcc

SEQ ID NO: 52743 - DNA, 22 bp, Homo Sapiens
ttcgaatcccatcctcgtcgcc

SEQ ID NO: 52744 - DNA, 21 bp, Homo Sapiens
ttcgaatccgagtcacggcac

SEQ ID NO: 52745 - DNA, 23 bp, Homo Sapiens
ttcgaatccgagtcacggcacca

SEQ ID NO: 52746 - DNA, 21 bp, Homo Sapiens
ttcgaatccggctcgaaggac

SEQ ID NO: 52747 - DNA, 22 bp, Homo Sapiens
ttcgaatccggctcgaaggacc

SEQ ID NO: 52748 - DNA, 22 bp, Homo Sapiens
ttcgaatccggctcggaggacc

SEQ ID NO: 52749 - DNA, 22 bp, Homo Sapiens
ttcgaatcctgccgactacgcc

SEQ ID NO: 52750 - DNA, 22 bp, Homo Sapiens
ttcgaatcctgttcgtgacgcc

SEQ ID NO: 52751 - DNA, 38 bp, Homo Sapiens; identical to SEQ ID NO: 29898

SEQ ID NO: 52752 - DNA, 21 bp, Homo Sapiens
ttcgactcccggtatgggaac

SEQ ID NO: 52753 - DNA, 22 bp, Homo Sapiens
ttcgactcccggtatgggaacc

SEQ ID NO: 52754 - DNA, 16 bp, Homo Sapiens
ttcgactcccggtgtg

SEQ ID NO: 52755 - DNA, 18 bp, Homo Sapiens
ttcgactcccggtgtggg

SEQ ID NO: 52756 - DNA, 19 bp, Homo Sapiens
ttcgactcccggtgtggga

SEQ ID NO: 52757 - DNA, 20 bp, Homo Sapiens
ttcgactcccggtgtgggaa

SEQ ID NO: 52758 - DNA, 21 bp, Homo Sapiens
ttcgactcccggtgtgggaac

SEQ ID NO: 52759 - DNA, 22 bp, Homo Sapiens
ttcgactcccggtgtgggaacc

SEQ ID NO: 52760 - DNA, 23 bp, Homo Sapiens
ttcgactcccggtgtgggaacca

SEQ ID NO: 52761 - DNA, 16 bp, Homo Sapiens
ttcgactcctggctgg

SEQ ID NO: 52762 - DNA, 21 bp, Homo Sapiens
ttcgactcctggctggctcgc

SEQ ID NO: 52763 - DNA, 22 bp, Homo Sapiens
ttcgactcctggctggctcgcc

SEQ ID NO: 52764 - DNA, 23 bp, Homo Sapiens
ttcgactcctggctggctcgcca

SEQ ID NO: 52765 - DNA, 22 bp, Homo Sapiens
ttcgagcccacccagggacgcc

SEQ ID NO: 52766 - DNA, 19 bp, Homo Sapiens
ttcgagccccagtggaacc

SEQ ID NO: 52767 - DNA, 20 bp, Homo Sapiens
ttcgagccccagtggaacca

SEQ ID NO: 52768 - DNA, 21 bp, Homo Sapiens
ttcgagccccagtggaaccac

SEQ ID NO: 52769 - DNA, 22 bp, Homo Sapiens
ttcgagccccagtggaaccacc

SEQ ID NO: 52770 - DNA, 23 bp, Homo Sapiens
ttcgagccccagtggaaccacca

SEQ ID NO: 52771 - DNA, 22 bp, Homo Sapiens
ttcgagtcccggcggagtcgcc

SEQ ID NO: 52772 - DNA, 20 bp, Homo Sapiens
ttcgagtctcggtggaacct

SEQ ID NO: 52773 - DNA, 23 bp, Homo Sapiens
ttcgagtctcggtggaacctcca

SEQ ID NO: 52774 - DNA, 21 bp, Homo Sapiens
ttcgatccccggcatctccac

SEQ ID NO: 52775 - DNA, 22 bp, Homo Sapiens
ttcgatccccggcatctccacc

SEQ ID NO: 52776 - DNA, 23 bp, Homo Sapiens
ttcgatccccggcatctccacca

SEQ ID NO: 52777 - DNA, 20 bp, Homo Sapiens
ttcgatccccgtacgggcca

SEQ ID NO: 52778 - DNA, 22 bp, Homo Sapiens
ttcgatccccgtacgggccacc

SEQ ID NO: 52779 - DNA, 22 bp, Homo Sapiens
ttcgatccccgtactggccacc

SEQ ID NO: 52780 - DNA, 21 bp, Homo Sapiens
ttcgatcccgggcggaaacac

SEQ ID NO: 52781 - DNA, 22 bp, Homo Sapiens
ttcgatcccgggcggaaacacc

SEQ ID NO: 52782 - DNA, 21 bp, Homo Sapiens
ttcgatcccgggtttcggcac

SEQ ID NO: 52783 - DNA, 22 bp, Homo Sapiens
ttcgatcccgggtttcggcacc

SEQ ID NO: 52784 - DNA, 16 bp, Homo Sapiens
ttcgattccccgacgg

SEQ ID NO: 52785 - DNA, 19 bp, Homo Sapiens
ttcgattccccgacgggga

SEQ ID NO: 52786 - DNA, 21 bp, Homo Sapiens
ttcgattccccgacggggagc

SEQ ID NO: 52787 - DNA, 22 bp, Homo Sapiens
ttcgattccccgacggggagcc

SEQ ID NO: 52788 - DNA, 23 bp, Homo Sapiens
ttcgattccccgacggggagcca

SEQ ID NO: 52789 - DNA, 18 bp, Homo Sapiens
ttcgattcccggccaacg

SEQ ID NO: 52790 - DNA, 22 bp, Homo Sapiens
ttcgattcccggccaacgcacc

SEQ ID NO: 52791 - DNA, 23 bp, Homo Sapiens
ttcgattcccggccaacgcacca

SEQ ID NO: 52792 - DNA, 21 bp, Homo Sapiens
ttcgattcccggccaatgcac

SEQ ID NO: 52793 - DNA, 22 bp, Homo Sapiens
ttcgattcccggccaatgcacc

SEQ ID NO: 52794 - DNA, 23 bp, Homo Sapiens
ttcgattcccggccaatgcacca

SEQ ID NO: 52795 - DNA, 16 bp, Homo Sapiens
ttcgattcccgggcgg

SEQ ID NO: 52796 - DNA, 17 bp, Homo Sapiens
ttcgattcccgggcggc

SEQ ID NO: 52797 - DNA, 18 bp, Homo Sapiens
ttcgattcccgggcggcg

SEQ ID NO: 52798 - DNA, 19 bp, Homo Sapiens
ttcgattcccgggcggcgc

SEQ ID NO: 52799 - DNA, 22 bp, Homo Sapiens
ttcgattcccgggcggcgcacc

SEQ ID NO: 52800 - DNA, 23 bp, Homo Sapiens
ttcgattcccgggcggcgcacca

SEQ ID NO: 52801 - DNA, 16 bp, Homo Sapiens
ttcgattcccggtcag

SEQ ID NO: 52802 - DNA, 17 bp, Homo Sapiens
ttcgattcccggtcagg

SEQ ID NO: 52803 - DNA, 21 bp, Homo Sapiens
ttcgattcccggtcagggaac

SEQ ID NO: 52804 - DNA, 22 bp, Homo Sapiens
ttcgattcccggtcagggaacc

SEQ ID NO: 52805 - DNA, 23 bp, Homo Sapiens
ttcgattcccggtcagggaacca

SEQ ID NO: 52806 - DNA, 21 bp, Homo Sapiens
ttcgattccggctcgaaggac

SEQ ID NO: 52807 - DNA, 22 bp, Homo Sapiens
ttcgattccggctcgaaggacc

SEQ ID NO: 52808 - DNA, 23 bp, Homo Sapiens
ttcgattccggctcgaaggacca

SEQ ID NO: 52809 - DNA, 18 bp, Homo Sapiens
ttcgattctcatagtcct

SEQ ID NO: 52810 - DNA, 23 bp, Homo Sapiens
ttcgattctcatagtcctagcca

SEQ ID NO: 52811 - DNA, 43 bp, Homo Sapiens; identical to SEQ ID NO: 42916

SEQ ID NO: 52812 - DNA, 43 bp, Homo Sapiens; identical to SEQ ID NO: 30025

SEQ ID NO: 52813 - DNA, 18 bp, Homo Sapiens
ttcggcgctctcaccgcc

SEQ ID NO: 52814 - DNA, 25 bp, Homo Sapiens
ttcggcgctctcaccgccgcggccc

SEQ ID NO: 52815 - DNA, 30 bp, Homo Sapiens; identical to SEQ ID NO: 30035

SEQ ID NO: 52816 - DNA, 17 bp, Homo Sapiens
ttcggctgttaaccgga

SEQ ID NO: 52817 - DNA, 18 bp, Homo Sapiens
ttcggctgttaaccggaa

SEQ ID NO: 52818 - DNA, 19 bp, Homo Sapiens
ttcgggtgcgagaggtccc

SEQ ID NO: 52819 - DNA, 43 bp, Homo Sapiens; identical to SEQ ID NO: 42929

SEQ ID NO: 52820 - DNA, 29 bp, Homo Sapiens
ttctaggttcgactcctggctggctcgcc

SEQ ID NO: 52821 - DNA, 37 bp, Homo Sapiens; identical to SEQ ID NO: 30078

SEQ ID NO: 52822 - DNA, 16 bp, Homo Sapiens
ttctcatagtcctagc

SEQ ID NO: 52823 - DNA, 17 bp, Homo Sapiens
ttctcatagtcctagcc

SEQ ID NO: 52824 - DNA, 16 bp, Homo Sapiens
ttctcgcctgccacgc

SEQ ID NO: 52825 - DNA, 25 bp, Homo Sapiens
ttctcgcctgccacgcgggaggccc

SEQ ID NO: 52826 - DNA, 27 bp, Homo Sapiens
ttctcgcctgccacgcgggaggcccgg

SEQ ID NO: 52827 - DNA, 29 bp, Homo Sapiens
ttctcgcctgccacgcgggaggcccgggt

SEQ ID NO: 52828 - DNA, 16 bp, Homo Sapiens
ttctcgctggggcctc

SEQ ID NO: 52829 - DNA, 17 bp, Homo Sapiens
ttctcgctggggcctcc

SEQ ID NO: 52830 - DNA, 18 bp, Homo Sapiens
ttctcgctggggcctcca

SEQ ID NO: 52831 - DNA, 16 bp, Homo Sapiens
ttctcgctttgggtgc

SEQ ID NO: 52832 - DNA, 17 bp, Homo Sapiens
ttctcggtttgggtccg

SEQ ID NO: 52833 - DNA, 45 bp, Homo Sapiens; identical to SEQ ID NO: 42950

SEQ ID NO: 52834 - DNA, 46 bp, Homo Sapiens; identical to SEQ ID NO: 42951

SEQ ID NO: 52835 - DNA, 47 bp, Homo Sapiens; identical to SEQ ID NO: 30094

SEQ ID NO: 52836 - DNA, 18 bp, Homo Sapiens
ttctggtctccggatgga

SEQ ID NO: 52837 - DNA, 19 bp, Homo Sapiens
ttctggtctccggatggag

SEQ ID NO: 52838 - DNA, 46 bp, Homo Sapiens; identical to SEQ ID NO: 42954

SEQ ID NO: 52839 - DNA, 47 bp, Homo Sapiens; identical to SEQ ID NO: 42955

SEQ ID NO: 52840 - DNA, 31 bp, Homo Sapiens; identical to SEQ ID NO: 30106

SEQ ID NO: 52841 - DNA, 31 bp, Homo Sapiens; identical to SEQ ID NO: 30114

SEQ ID NO: 52842 - DNA, 32 bp, Homo Sapiens; identical to SEQ ID NO: 30115

SEQ ID NO: 52843 - DNA, 33 bp, Homo Sapiens; identical to SEQ ID NO: 30116

SEQ ID NO: 52844 - DNA, 34 bp, Homo Sapiens; identical to SEQ ID NO: 30117

SEQ ID NO: 52845 - DNA, 35 bp, Homo Sapiens; identical to SEQ ID NO: 30118

SEQ ID NO: 52846 - DNA, 36 bp, Homo Sapiens; identical to SEQ ID NO: 30119

SEQ ID NO: 52847 - DNA, 37 bp, Homo Sapiens; identical to SEQ ID NO: 30120

SEQ ID NO: 52848 - DNA, 38 bp, Homo Sapiens; identical to SEQ ID NO: 30121

SEQ ID NO: 52849 - DNA, 31 bp, Homo Sapiens
ttgaaatccattggggtttccccgcgcaggt

SEQ ID NO: 52850 - DNA, 20 bp, Homo Sapiens
ttgaatccagcgatccgagt

SEQ ID NO: 52851 - DNA, 22 bp, Homo Sapiens
ttgaatccagcgatccgagttc

SEQ ID NO: 52852 - DNA, 43 bp, Homo Sapiens; identical to SEQ ID NO: 30151

SEQ ID NO: 52853 - DNA, 44 bp, Homo Sapiens; identical to SEQ ID NO: 30152

SEQ ID NO: 52854 - DNA, 45 bp, Homo Sapiens; identical to SEQ ID NO: 30153

SEQ ID NO: 52855 - DNA, 28 bp, Homo Sapiens
ttgacccgggttcgattcccggccaacg

SEQ ID NO: 52856 - DNA, 32 bp, Homo Sapiens; identical to SEQ ID NO: 30165

SEQ ID NO: 52857 - DNA, 33 bp, Homo Sapiens; identical to SEQ ID NO: 30166

SEQ ID NO: 52858 - DNA, 16 bp, Homo Sapiens
ttgaccgctctgacca

SEQ ID NO: 52859 - DNA, 23 bp, Homo Sapiens
ttgactgcagatcaagaggtccc

SEQ ID NO: 52860 - DNA, 27 bp, Homo Sapiens
ttgactgcagatcaagaggtccccggt

SEQ ID NO: 52861 - DNA, 24 bp, Homo Sapiens
ttgactgcagatcaagaggtccct

SEQ ID NO: 52862 - DNA, 28 bp, Homo Sapiens
ttgagggttcgaatcccttcgtggttgc

SEQ ID NO: 52863 - DNA, 29 bp, Homo Sapiens
ttgagggttcgaatcccttcgtggttgcc

SEQ ID NO: 52864 - DNA, 27 bp, Homo Sapiens
ttgagggttcgagtcccttcgtggtcg

SEQ ID NO: 52865 - DNA, 28 bp, Homo Sapiens
ttgagggttcgagtcccttcgtggtcgc

SEQ ID NO: 52866 - DNA, 29 bp, Homo Sapiens
ttgagggttcgagtcccttcgtggtcgcc

SEQ ID NO: 52867 - DNA, 30 bp, Homo Sapiens; identical to SEQ ID NO: 30176

SEQ ID NO: 52868 - DNA, 31 bp, Homo Sapiens; identical to SEQ ID NO: 30190

SEQ ID NO: 52869 - DNA, 36 bp, Homo Sapiens; identical to SEQ ID NO: 30195

SEQ ID NO: 52870 - DNA, 32 bp, Homo Sapiens; identical to SEQ ID NO: 30209

SEQ ID NO: 52871 - DNA, 18 bp, Homo Sapiens
ttgattagggtgcttagc

SEQ ID NO: 52872 - DNA, 20 bp, Homo Sapiens
ttgattagggtgcttagctg

SEQ ID NO: 52873 - DNA, 23 bp, Homo Sapiens
ttgattagggtgcttagctgtta

SEQ ID NO: 52874 - DNA, 24 bp, Homo Sapiens
ttgattagggtgcttagctgttaa

SEQ ID NO: 52875 - DNA, 25 bp, Homo Sapiens
ttgattagggtgcttagctgttaac

SEQ ID NO: 52876 - DNA, 26 bp, Homo Sapiens
ttgattagggtgcttagctgttaact

SEQ ID NO: 52877 - DNA, 28 bp, Homo Sapiens
ttgattagggtgcttagctgttaactaa

SEQ ID NO: 52878 - DNA, 21 bp, Homo Sapiens
ttgcaaattcgaagaagcagc

SEQ ID NO: 52879 - DNA, 31 bp, Homo Sapiens; identical to SEQ ID NO: 30232

SEQ ID NO: 52880 - DNA, 38 bp, Homo Sapiens; identical to SEQ ID NO: 30234

SEQ ID NO: 52881 - DNA, 39 bp, Homo Sapiens; identical to SEQ ID NO: 30235

SEQ ID NO: 52882 - DNA, 40 bp, Homo Sapiens; identical to SEQ ID NO: 30236

SEQ ID NO: 52883 - DNA, 28 bp, Homo Sapiens
ttgcacgcgtgggttcgaatcccatcct

SEQ ID NO: 52884 - DNA, 30 bp, Homo Sapiens; identical to SEQ ID NO: 30248

SEQ ID NO: 52885 - DNA, 35 bp, Homo Sapiens; identical to SEQ ID NO: 30250

SEQ ID NO: 52886 - DNA, 36 bp, Homo Sapiens; identical to SEQ ID NO: 30251

SEQ ID NO: 52887 - DNA, 28 bp, Homo Sapiens
ttgcaggttcgagtcctgccgcggtcgc

SEQ ID NO: 52888 - DNA, 29 bp, Homo Sapiens
ttgcaggttcgagtcctgccgcggtcgcc

SEQ ID NO: 52889 - DNA, 21 bp, Homo Sapiens
ttgcgacccgggttcgattcc

SEQ ID NO: 52890 - DNA, 23 bp, Homo Sapiens
ttgcgacccgggttcgattcccg

SEQ ID NO: 52891 - DNA, 28 bp, Homo Sapiens
ttgcgacccgggttcgattcccgggcgg

SEQ ID NO: 52892 - DNA, 29 bp, Homo Sapiens
ttgcgacccgggttcgattcccgggcggc

SEQ ID NO: 52893 - DNA, 30 bp, Homo Sapiens; identical to SEQ ID NO: 30268

SEQ ID NO: 52894 - DNA, 34 bp, Homo Sapiens; identical to SEQ ID NO: 30271

SEQ ID NO: 52895 - DNA, 26 bp, Homo Sapiens
ttgcgtgttcaaatcacgtcggggtc

SEQ ID NO: 52896 - DNA, 27 bp, Homo Sapiens
ttgcgtgttcaagtcacgtcggggtca

SEQ ID NO: 52897 - DNA, 29 bp, Homo Sapiens
ttgcgtgttcaagtcacgtcggggtcacc

SEQ ID NO: 52898 - DNA, 16 bp, Homo Sapiens
ttgcgttcagttgatg

SEQ ID NO: 52899 - DNA, 35 bp, Homo Sapiens; identical to SEQ ID NO: 30296

SEQ ID NO: 52900 - DNA, 40 bp, Homo Sapiens; identical to SEQ ID NO: 30306

SEQ ID NO: 52901 - DNA, 23 bp, Homo Sapiens
ttgggagagcgttagactgaaga

SEQ ID NO: 52902 - DNA, 22 bp, Homo Sapiens
ttgggtccgagaggtcccgggt

SEQ ID NO: 52903 - DNA, 18 bp, Homo Sapiens
ttgggtgcgagaggtccc

SEQ ID NO: 52904 - DNA, 19 bp, Homo Sapiens
ttgggtgcgagaggtcccg

SEQ ID NO: 52905 - DNA, 22 bp, Homo Sapiens
ttgggtgcgagaggtcccgggt

SEQ ID NO: 52906 - DNA, 23 bp, Homo Sapiens
ttgggtgcgagaggtcccgggtt

SEQ ID NO: 52907 - DNA, 28 bp, Homo Sapiens
ttgggtgctaatggtggagttaaagact

SEQ ID NO: 52908 - DNA, 39 bp, Homo Sapiens; identical to SEQ ID NO: 30353

SEQ ID NO: 52909 - DNA, 40 bp, Homo Sapiens; identical to SEQ ID NO: 30354

SEQ ID NO: 52910 - DNA, 41 bp, Homo Sapiens; identical to SEQ ID NO: 30355

SEQ ID NO: 52911 - DNA, 19 bp, Homo Sapiens
ttggtagagcatgggactc

SEQ ID NO: 52912 - DNA, 26 bp, Homo Sapiens
ttggtagagcatgggactcttaatcc

SEQ ID NO: 52913 - DNA, 16 bp, Homo Sapiens
ttggtcgtggttgtag

SEQ ID NO: 52914 - DNA, 17 bp, Homo Sapiens
ttggtcgtggttgtagt

SEQ ID NO: 52915 - DNA, 18 bp, Homo Sapiens
ttggtcgtggttgtagtc

SEQ ID NO: 52916 - DNA, 19 bp, Homo Sapiens
ttggtcgtggttgtagtcc

SEQ ID NO: 52917 - DNA, 20 bp, Homo Sapiens
ttggtcgtggttgtagtccg

SEQ ID NO: 52918 - DNA, 21 bp, Homo Sapiens
ttggtcgtggttgtagtccgt

SEQ ID NO: 52919 - DNA, 22 bp, Homo Sapiens
ttggtcgtggttgtagtccgtg

SEQ ID NO: 52920 - DNA, 23 bp, Homo Sapiens
ttggtcgtggttgtagtccgtgc

SEQ ID NO: 52921 - DNA, 24 bp, Homo Sapiens
ttggtcgtggttgtagtccgtgcg

SEQ ID NO: 52922 - DNA, 25 bp, Homo Sapiens
ttggtcgtggttgtagtccgtgcga

SEQ ID NO: 52923 - DNA, 26 bp, Homo Sapiens
ttggtcgtggttgtagtccgtgcgag

SEQ ID NO: 52924 - DNA, 27 bp, Homo Sapiens
ttggtcgtggttgtagtccgtgcgaga

SEQ ID NO: 52925 - DNA, 28 bp, Homo Sapiens
ttggtcgtggttgtagtccgtgcgagaa

SEQ ID NO: 52926 - DNA, 29 bp, Homo Sapiens
ttggtcgtggttgtagtccgtgcgagaat

SEQ ID NO: 52927 - DNA, 30 bp, Homo Sapiens; identical to SEQ ID NO: 30377

SEQ ID NO: 52928 - DNA, 31 bp, Homo Sapiens; identical to SEQ ID NO: 30378

SEQ ID NO: 52929 - DNA, 32 bp, Homo Sapiens; identical to SEQ ID NO: 30379

SEQ ID NO: 52930 - DNA, 33 bp, Homo Sapiens; identical to SEQ ID NO: 30380

SEQ ID NO: 52931 - DNA, 22 bp, Homo Sapiens
ttggtctaggggtatgattctc

SEQ ID NO: 52932 - DNA, 24 bp, Homo Sapiens
ttggtctaggggtatgattctcgc

SEQ ID NO: 52933 - DNA, 25 bp, Homo Sapiens
ttggtctaggggtatgattctcgct

SEQ ID NO: 52934 - DNA, 26 bp, Homo Sapiens
ttggtctaggggtatgattctcgctt

SEQ ID NO: 52935 - DNA, 26 bp, Homo Sapiens
ttggtggtatagtggtgagcatagct

SEQ ID NO: 52936 - DNA, 29 bp, Homo Sapiens
ttggtggttcaatggtagaattctcgcct

SEQ ID NO: 52937 - DNA, 17 bp, Homo Sapiens
ttggtggttcagtggta

SEQ ID NO: 52938 - DNA, 20 bp, Homo Sapiens
ttggtggttcagtggtagaa

SEQ ID NO: 52939 - DNA, 21 bp, Homo Sapiens
ttggtggttcagtggtagaat

SEQ ID NO: 52940 - DNA, 23 bp, Homo Sapiens
ttggtggttcagtggtagaattc

SEQ ID NO: 52941 - DNA, 24 bp, Homo Sapiens
ttggtggttcagtggtagaattct

SEQ ID NO: 52942 - DNA, 25 bp, Homo Sapiens
ttggtggttcagtggtagaattctc

SEQ ID NO: 52943 - DNA, 26 bp, Homo Sapiens
ttggtggttcagtggtagaattctcg

SEQ ID NO: 52944 - DNA, 27 bp, Homo Sapiens
ttggtggttcagtggtagaattctcgc

SEQ ID NO: 52945 - DNA, 28 bp, Homo Sapiens
ttggtggttcagtggtagaattctcgcc

SEQ ID NO: 52946 - DNA, 29 bp, Homo Sapiens
ttggtggttcagtggtagaattctcgcct

SEQ ID NO: 52947 - DNA, 30 bp, Homo Sapiens; identical to SEQ ID NO: 30459

SEQ ID NO: 52948 - DNA, 31 bp, Homo Sapiens; identical to SEQ ID NO: 30460

SEQ ID NO: 52949 - DNA, 32 bp, Homo Sapiens; identical to SEQ ID NO: 30461

SEQ ID NO: 52950 - DNA, 33 bp, Homo Sapiens; identical to SEQ ID NO: 30462

SEQ ID NO: 52951 - DNA, 34 bp, Homo Sapiens; identical to SEQ ID NO: 30463

SEQ ID NO: 52952 - DNA, 35 bp, Homo Sapiens; identical to SEQ ID NO: 30464

SEQ ID NO: 52953 - DNA, 44 bp, Homo Sapiens; identical to SEQ ID NO: 30473

SEQ ID NO: 52954 - DNA, 45 bp, Homo Sapiens; identical to SEQ ID NO: 30474

SEQ ID NO: 52955 - DNA, 46 bp, Homo Sapiens; identical to SEQ ID NO: 30475

SEQ ID NO: 52956 - DNA, 47 bp, Homo Sapiens; identical to SEQ ID NO: 30476

SEQ ID NO: 52957 - DNA, 26 bp, Homo Sapiens
ttggtggttcgagcccacccagggac

SEQ ID NO: 52958 - DNA, 28 bp, Homo Sapiens
ttggtggttcgagcccacccagggacgc

SEQ ID NO: 52959 - DNA, 29 bp, Homo Sapiens
ttggtggttcgagcccacccagggacgcc

SEQ ID NO: 52960 - DNA, 30 bp, Homo Sapiens; identical to SEQ ID NO: 30485

SEQ ID NO: 52961 - DNA, 29 bp, Homo Sapiens
ttggtggttcgatcccacccagggacgcc

SEQ ID NO: 52962 - DNA, 26 bp, Homo Sapiens
ttggttatacccttcccgtactacca

SEQ ID NO: 52963 - DNA, 17 bp, Homo Sapiens
ttgtaaacaggagatcc

SEQ ID NO: 52964 - DNA, 22 bp, Homo Sapiens
ttgtaaaccaggggtcgcgagt

SEQ ID NO: 52965 - DNA, 43 bp, Homo Sapiens; identical to SEQ ID NO: 30509

SEQ ID NO: 52966 - DNA, 21 bp, Homo Sapiens
ttgtaaaccggagatgaaaac

SEQ ID NO: 52967 - DNA, 22 bp, Homo Sapiens
ttgtaaaccggagatgaaaacc

SEQ ID NO: 52968 - DNA, 32 bp, Homo Sapiens; identical to SEQ ID NO: 30527

SEQ ID NO: 52969 - DNA, 35 bp, Homo Sapiens; identical to SEQ ID NO: 30530

SEQ ID NO: 52970 - DNA, 36 bp, Homo Sapiens; identical to SEQ ID NO: 30531

SEQ ID NO: 52971 - DNA, 37 bp, Homo Sapiens; identical to SEQ ID NO: 30532

SEQ ID NO: 52972 - DNA, 38 bp, Homo Sapiens; identical to SEQ ID NO: 30533

SEQ ID NO: 52973 - DNA, 39 bp, Homo Sapiens; identical to SEQ ID NO: 30534

SEQ ID NO: 52974 - DNA, 18 bp, Homo Sapiens
ttgtagtccgtgcgagaa

SEQ ID NO: 52975 - DNA, 19 bp, Homo Sapiens
ttgtagtccgtgcgagaat

SEQ ID NO: 52976 - DNA, 20 bp, Homo Sapiens
ttgtagtccgtgcgagaata

SEQ ID NO: 52977 - DNA, 21 bp, Homo Sapiens
ttgtagtccgtgcgagaatac

SEQ ID NO: 52978 - DNA, 22 bp, Homo Sapiens
ttgtagtccgtgcgagaatacc

SEQ ID NO: 52979 - DNA, 23 bp, Homo Sapiens
ttgtagtccgtgcgagaatacca

SEQ ID NO: 52980 - DNA, 16 bp, Homo Sapiens
ttgtgaatctgacaac

SEQ ID NO: 52981 - DNA, 17 bp, Homo Sapiens
ttgtgaatctgacaaca

SEQ ID NO: 52982 - DNA, 18 bp, Homo Sapiens
ttgtgaatctgacaacag

SEQ ID NO: 52983 - DNA, 19 bp, Homo Sapiens
ttgtgaatctgacaacaga

SEQ ID NO: 52984 - DNA, 22 bp, Homo Sapiens
ttgtgaatctgacaacagaggc

SEQ ID NO: 52985 - DNA, 23 bp, Homo Sapiens
ttgtgaatctgacaacagaggct

SEQ ID NO: 52986 - DNA, 24 bp, Homo Sapiens
ttgtgaatctgacaacagaggctt

SEQ ID NO: 52987 - DNA, 27 bp, Homo Sapiens
ttgtgaatctgacaacagaggcttacg

SEQ ID NO: 52988 - DNA, 29 bp, Homo Sapiens
ttgtgaatctgacaacagaggcttacgac

SEQ ID NO: 52989 - DNA, 30 bp, Homo Sapiens; identical to SEQ ID NO: 30580

SEQ ID NO: 52990 - DNA, 31 bp, Homo Sapiens; identical to SEQ ID NO: 30581

SEQ ID NO: 52991 - DNA, 32 bp, Homo Sapiens; identical to SEQ ID NO: 30582

SEQ ID NO: 52992 - DNA, 33 bp, Homo Sapiens; identical to SEQ ID NO: 30583

SEQ ID NO: 52993 - DNA, 34 bp, Homo Sapiens; identical to SEQ ID NO: 30584

SEQ ID NO: 52994 - DNA, 35 bp, Homo Sapiens; identical to SEQ ID NO: 30585

SEQ ID NO: 52995 - DNA, 37 bp, Homo Sapiens; identical to SEQ ID NO: 30587

SEQ ID NO: 52996 - DNA, 40 bp, Homo Sapiens; identical to SEQ ID NO: 30590

SEQ ID NO: 52997 - DNA, 41 bp, Homo Sapiens; identical to SEQ ID NO: 30591

SEQ ID NO: 52998 - DNA, 42 bp, Homo Sapiens; identical to SEQ ID NO: 30592

SEQ ID NO: 52999 - DNA, 43 bp, Homo Sapiens; identical to SEQ ID NO: 30593

SEQ ID NO: 53000 - DNA, 44 bp, Homo Sapiens; identical to SEQ ID NO: 30594

SEQ ID NO: 53001 - DNA, 29 bp, Homo Sapiens
ttgtgagttcgatcctcacctggagcacc

SEQ ID NO: 53002 - DNA, 30 bp, Homo Sapiens
ttgtgagttcgatcctcacctggagcacca

SEQ ID NO: 53003 - DNA, 23 bp, Homo Sapiens
ttgtgctttgcacgcgtgggttc

SEQ ID NO: 53004 - DNA, 24 bp, Homo Sapiens
ttgtgctttgcacgcgtgggttcg

SEQ ID NO: 53005 - DNA, 42 bp, Homo Sapiens; identical to SEQ ID NO: 30607

SEQ ID NO: 53006 - DNA, 17 bp, Homo Sapiens
ttgtggccgcagcaacc

SEQ ID NO: 53007 - DNA, 18 bp, Homo Sapiens
ttgtggccgcagcaacct

SEQ ID NO: 53008 - DNA, 28 bp, Homo Sapiens
ttgtgggttcgaatcccaccagagtcgc

SEQ ID NO: 53009 - DNA, 29 bp, Homo Sapiens
ttgtgggttcgaatcccaccagagtcgcc

SEQ ID NO: 53010 - DNA, 29 bp, Homo Sapiens
ttgtgggttcgagtcccaccagagtcgcc

SEQ ID NO: 53011 - DNA, 27 bp, Homo Sapiens
ttgtgggttcgagtcccatctggggtg

SEQ ID NO: 53012 - DNA, 26 bp, Homo Sapiens
ttgtgggttcgagtcccatctgggtc

SEQ ID NO: 53013 - DNA, 28 bp, Homo Sapiens
ttgtgggttcgagtcccatctgggtcgc

SEQ ID NO: 53014 - DNA, 29 bp, Homo Sapiens
ttgtgggttcgagtcccatctgggtcgcc

SEQ ID NO: 53015 - DNA, 28 bp, Homo Sapiens
ttgtgggtttaagtcccattggtctagc

SEQ ID NO: 53016 - DNA, 29 bp, Homo Sapiens
ttgtgggtttaagtcccattggtctagcc

SEQ ID NO: 53017 - DNA, 27 bp, Homo Sapiens
tttaaccaaaacatcagattgtgaatc

SEQ ID NO: 53018 - DNA, 24 bp, Homo Sapiens
tttaactgtagatcaagaggtccc

SEQ ID NO: 53019 - DNA, 18 bp, Homo Sapiens
tttaagtcccattggtct

SEQ ID NO: 53020 - DNA, 24 bp, Homo Sapiens
tttaagttaaagattaagagaacc

SEQ ID NO: 53021 - DNA, 30 bp, Homo Sapiens; identical to SEQ ID NO: 30700

SEQ ID NO: 53022 - DNA, 43 bp, Homo Sapiens; identical to SEQ ID NO: 30710

SEQ ID NO: 53023 - DNA, 44 bp, Homo Sapiens; identical to SEQ ID NO: 30711

SEQ ID NO: 53024 - DNA, 45 bp, Homo Sapiens; identical to SEQ ID NO: 30712

SEQ ID NO: 53025 - DNA, 20 bp, Homo Sapiens
tttacacgcagaaggtcctg

SEQ ID NO: 53026 - DNA, 40 bp, Homo Sapiens; identical to SEQ ID NO: 30721

SEQ ID NO: 53027 - DNA, 44 bp, Homo Sapiens; identical to SEQ ID NO: 30722

SEQ ID NO: 53028 - DNA, 16 bp, Homo Sapiens
tttacagtcagaggtt

SEQ ID NO: 53029 - DNA, 18 bp, Homo Sapiens
tttagacgggctcacatc

SEQ ID NO: 53030 - DNA, 21 bp, Homo Sapiens
tttagacgggctcacatcacc

SEQ ID NO: 53031 - DNA, 22 bp, Homo Sapiens
tttagacgggctcacatcaccc

SEQ ID NO: 53032 - DNA, 30 bp, Homo Sapiens; identical to SEQ ID NO: 30752

SEQ ID NO: 53033 - DNA, 32 bp, Homo Sapiens; identical to SEQ ID NO: 30754

SEQ ID NO: 53034 - DNA, 33 bp, Homo Sapiens; identical to SEQ ID NO: 30755

SEQ ID NO: 53035 - DNA, 17 bp, Homo Sapiens
tttaggctccagtctct

SEQ ID NO: 53036 - DNA, 17 bp, Homo Sapiens
tttcaacttaacttgac

SEQ ID NO: 53037 - DNA, 19 bp, Homo Sapiens
tttcaacttaacttgaccg

SEQ ID NO: 53038 - DNA, 22 bp, Homo Sapiens
tttcaacttaacttgaccgctc

SEQ ID NO: 53039 - DNA, 24 bp, Homo Sapiens
tttcaacttaacttgaccgctctg

SEQ ID NO: 53040 - DNA, 25 bp, Homo Sapiens
tttcaacttaacttgaccgctctga

SEQ ID NO: 53041 - DNA, 26 bp, Homo Sapiens
tttcaacttaacttgaccgctctgac

SEQ ID NO: 53042 - DNA, 27 bp, Homo Sapiens
tttcaacttaacttgaccgctctgacc

SEQ ID NO: 53043 - DNA, 28 bp, Homo Sapiens
tttcaacttaacttgaccgctctgacca

SEQ ID NO: 53044 - DNA, 36 bp, Homo Sapiens; identical to SEQ ID NO: 30790

SEQ ID NO: 53045 - DNA, 40 bp, Homo Sapiens; identical to SEQ ID NO: 30793

SEQ ID NO: 53046 - DNA, 41 bp, Homo Sapiens; identical to SEQ ID NO: 30794

SEQ ID NO: 53047 - DNA, 42 bp, Homo Sapiens; identical to SEQ ID NO: 30795

SEQ ID NO: 53048 - DNA, 33 bp, Homo Sapiens; identical to SEQ ID NO: 30803

SEQ ID NO: 53049 - DNA, 34 bp, Homo Sapiens; identical to SEQ ID NO: 30821

SEQ ID NO: 53050 - DNA, 37 bp, Homo Sapiens; identical to SEQ ID NO: 30824

SEQ ID NO: 53051 - DNA, 38 bp, Homo Sapiens; identical to SEQ ID NO: 30825

SEQ ID NO: 53052 - DNA, 39 bp, Homo Sapiens; identical to SEQ ID NO: 30826

SEQ ID NO: 53053 - DNA, 40 bp, Homo Sapiens; identical to SEQ ID NO: 30827

SEQ ID NO: 53054 - DNA, 42 bp, Homo Sapiens; identical to SEQ ID NO: 30829

SEQ ID NO: 53055 - DNA, 43 bp, Homo Sapiens; identical to SEQ ID NO: 30830

SEQ ID NO: 53056 - DNA, 36 bp, Homo Sapiens; identical to SEQ ID NO: 30844

SEQ ID NO: 53057 - DNA, 21 bp, Homo Sapiens
tttccccgcgcaggttcgaat

SEQ ID NO: 53058 - DNA, 36 bp, Homo Sapiens; identical to SEQ ID NO: 30851

SEQ ID NO: 53059 - DNA, 31 bp, Homo Sapiens; identical to SEQ ID NO: 30860

SEQ ID NO: 53060 - DNA, 32 bp, Homo Sapiens; identical to SEQ ID NO: 30861

SEQ ID NO: 53061 - DNA, 22 bp, Homo Sapiens
tttccgtagtgtagtggtcatc

SEQ ID NO: 53062 - DNA, 30 bp, Homo Sapiens; identical to SEQ ID NO: 30871

SEQ ID NO: 53063 - DNA, 31 bp, Homo Sapiens; identical to SEQ ID NO: 30872

SEQ ID NO: 53064 - DNA, 32 bp, Homo Sapiens; identical to SEQ ID NO: 30873

SEQ ID NO: 53065 - DNA, 22 bp, Homo Sapiens
tttccgtagtgtagtggttatc

SEQ ID NO: 53066 - DNA, 23 bp, Homo Sapiens
tttccgtagtgtagtggttatca

SEQ ID NO: 53067 - DNA, 28 bp, Homo Sapiens
tttccgtagtgtagtggttatcacgttc

SEQ ID NO: 53068 - DNA, 29 bp, Homo Sapiens
tttccgtagtgtagtggttatcacgttcg

SEQ ID NO: 53069 - DNA, 30 bp, Homo Sapiens; identical to SEQ ID NO: 30883

SEQ ID NO: 53070 - DNA, 31 bp, Homo Sapiens; identical to SEQ ID NO: 30884

SEQ ID NO: 53071 - DNA, 32 bp, Homo Sapiens; identical to SEQ ID NO: 30885

SEQ ID NO: 53072 - DNA, 33 bp, Homo Sapiens; identical to SEQ ID NO: 30887

SEQ ID NO: 53073 - DNA, 34 bp, Homo Sapiens; identical to SEQ ID NO: 30888

SEQ ID NO: 53074 - DNA, 23 bp, Homo Sapiens
tttgatagagtaaataataggag

SEQ ID NO: 53075 - DNA, 25 bp, Homo Sapiens
tttgatagagtaaataataggagct

SEQ ID NO: 53076 - DNA, 32 bp, Homo Sapiens; identical to SEQ ID NO: 30951

SEQ ID NO: 53077 - DNA, 35 bp, Homo Sapiens; identical to SEQ ID NO: 30954

SEQ ID NO: 53078 - DNA, 22 bp, Homo Sapiens
tttgcacgcgtgggttcgaatc

SEQ ID NO: 53079 - DNA, 36 bp, Homo Sapiens; identical to SEQ ID NO: 30968

SEQ ID NO: 53080 - DNA, 19 bp, Homo Sapiens
tttgcacgtatgaggcccc

SEQ ID NO: 53081 - DNA, 38 bp, Homo Sapiens
tttgcacgtatgaggccccgggttcaatccccggcatc

SEQ ID NO: 53082 - DNA, 40 bp, Homo Sapiens; identical to SEQ ID NO: 30982

SEQ ID NO: 53083 - DNA, 41 bp, Homo Sapiens; identical to SEQ ID NO: 30983

SEQ ID NO: 53084 - DNA, 19 bp, Homo Sapiens
tttgggtccgagaggtccc

SEQ ID NO: 53085 - DNA, 23 bp, Homo Sapiens
tttgggtccgagaggtcccgggt

SEQ ID NO: 53086 - DNA, 19 bp, Homo Sapiens
tttgggtgcgagaggtccc

SEQ ID NO: 53087 - DNA, 20 bp, Homo Sapiens
tttgggtgcgagaggtcccg

SEQ ID NO: 53088 - DNA, 23 bp, Homo Sapiens
tttgggtgcgagaggtcccgggt

SEQ ID NO: 53089 - DNA, 24 bp, Homo Sapiens
tttgggtgcgagaggtcccgggtt

SEQ ID NO: 53090 - DNA, 35 bp, Homo Sapiens
tttgggtgcgagaggtcccgggttcaaatcccgga

SEQ ID NO: 53091 - DNA, 36 bp, Homo Sapiens
tttgggtgctaatggtggagttaaagactttttctc

SEQ ID NO: 53092 - DNA, 41 bp, Homo Sapiens; identical to SEQ ID NO: 31016

SEQ ID NO: 53093 - DNA, 42 bp, Homo Sapiens; identical to SEQ ID NO: 31017

SEQ ID NO: 53094 - DNA, 22 bp, Homo Sapiens
tttgtcaaagttaaattatagg

SEQ ID NO: 53095 - DNA, 29 bp, Homo Sapiens
tttgtgggtttaagtcccattggtctagc

SEQ ID NO: 53096 - DNA, 30 bp, Homo Sapiens; identical to SEQ ID NO: 31052

SEQ ID NO: 53097 - DNA, 25 bp, Homo Sapiens
ttttaagttaaagattaagagaacc

SEQ ID NO: 53098 - DNA, 32 bp, Homo Sapiens; identical to SEQ ID NO: 31082

SEQ ID NO: 53099 - DNA, 16 bp, Homo Sapiens
ttttcacccaggcggc

SEQ ID NO: 53100 - DNA, 17 bp, Homo Sapiens
ttttcacccaggcggcc

SEQ ID NO: 53101 - DNA, 19 bp, Homo Sapiens
ttttcacccaggcggcccg

SEQ ID NO: 53102 - DNA, 21 bp, Homo Sapiens
ttttcacccaggcggcccggg

SEQ ID NO: 53103 - DNA, 22 bp, Homo Sapiens
ttttcacccaggcggcccgggt

SEQ ID NO: 53104 - DNA, 36 bp, Homo Sapiens; identical to SEQ ID NO: 31108

SEQ ID NO: 53105 - DNA, 37 bp, Homo Sapiens; identical to SEQ ID NO: 31109

SEQ ID NO: 53106 - DNA, 41 bp, Homo Sapiens; identical to SEQ ID NO: 31112

SEQ ID NO: 53107 - DNA, 42 bp, Homo Sapiens; identical to SEQ ID NO: 31113

SEQ ID NO: 53108 - DNA, 43 bp, Homo Sapiens; identical to SEQ ID NO: 31114

SEQ ID NO: 53109 - DNA, 44 bp, Homo Sapiens; identical to SEQ ID NO: 31115

SEQ ID NO: 53110 - DNA, 17 bp, Homo Sapiens
ttttcatatcattggtc

SEQ ID NO: 53111 - DNA, 38 bp, Homo Sapiens; identical to SEQ ID NO: 31139

SEQ ID NO: 53112 - DNA, 39 bp, Homo Sapiens; identical to SEQ ID NO: 31140

SEQ ID NO: 53113 - DNA, 40 bp, Homo Sapiens; identical to SEQ ID NO: 31141

SEQ ID NO: 53114 - DNA, 41 bp, Homo Sapiens; identical to SEQ ID NO: 31142

SEQ ID NO: 53115 - DNA, 43 bp, Homo Sapiens; identical to SEQ ID NO: 31144

SEQ ID NO: 53116 - DNA, 44 bp, Homo Sapiens; identical to SEQ ID NO: 31145

SEQ ID NO: 53117 - DNA, 16 bp, Homo Sapiens
ttttccaaggacacca

SEQ ID NO: 53118 - DNA, 16 bp, Homo Sapiens
ttttgcagtccttacc

SEQ ID NO: 53119 - DNA, 41 bp, Homo Sapiens; identical to SEQ ID NO: 31159

SEQ ID NO: 53120 - DNA, 42 bp, Homo Sapiens; identical to SEQ ID NO: 31160

SEQ ID NO: 53121 - DNA, 18 bp, Homo Sapiens
tttttcatatcattggtc

SEQ ID NO: 53122 - DNA, 19 bp, Homo Sapiens
tttttcatatcattggtcg

SEQ ID NO: 53123 - DNA, 29 bp, Homo Sapiens
tttttcatatcattggtcgtggttgtagt

SEQ ID NO: 53124 - DNA, 31 bp, Homo Sapiens; identical to SEQ ID NO: 31182

SEQ ID NO: 53125 - DNA, 35 bp, Homo Sapiens; identical to SEQ ID NO: 31186

SEQ ID NO: 53126 - DNA, 36 bp, Homo Sapiens; identical to SEQ ID NO: 31187

SEQ ID NO: 53127 - DNA, 39 bp, Homo Sapiens; identical to SEQ ID NO: 31189

SEQ ID NO: 53128 - DNA, 40 bp, Homo Sapiens; identical to SEQ ID NO: 31190

SEQ ID NO: 53129 - DNA, 41 bp, Homo Sapiens; identical to SEQ ID NO: 31191

SEQ ID NO: 53130 - DNA, 42 bp, Homo Sapiens; identical to SEQ ID NO: 31192

SEQ ID NO: 53131 - DNA, 44 bp, Homo Sapiens; identical to SEQ ID NO: 31194

SEQ ID NO: 53132 - DNA, 45 bp, Homo Sapiens; identical to SEQ ID NO: 31195

SEQ ID NO: 53133 - DNA, 16 bp, Homo Sapiens
tttttccaaggacacc

SEQ ID NO: 53134 - DNA, 17 bp, Homo Sapiens
tttttccaaggacacca

SEQ ID NO: 53135 - DNA, 27 bp, Homo Sapiens
tgagggttcgaatcccttcgtggttgc

SEQ ID NO: 53136 - DNA, 27 bp, Homo Sapiens
aggcggcccgggttcgactcccggtgt

SEQ ID NO: 53137 - DNA, 24 bp, Homo Sapiens
cgggttcgactcccggtatgggaa

SEQ ID NO: 53138 - DNA, 17 bp, Homo Sapiens
aatctcggtgggacctc

SEQ ID NO: 53139 - DNA, 33 bp, Homo Sapiens; identical to SEQ ID NO: 15309

SEQ ID NO: 53140 - DNA, 38 bp, Homo Sapiens; identical to SEQ ID NO: 33911

SEQ ID NO: 53141 - DNA, 22 bp, Homo Sapiens
gttcgagcctcagagagggcac

SEQ ID NO: 53142 - DNA, 31 bp, Homo Sapiens; identical to SEQ ID NO: 31615

SEQ ID NO: 53143 - DNA, 38 bp, Homo Sapiens; identical to SEQ ID NO: 33917

SEQ ID NO: 53144 - DNA, 37 bp, Homo Sapiens; identical to SEQ ID NO: 36634

SEQ ID NO: 53145 - DNA, 37 bp, Homo Sapiens; identical to SEQ ID NO: 19938

SEQ ID NO: 53146 - DNA, 28 bp, Homo Sapiens
ttgagggttcgaatcccttcgtggttgc

SEQ ID NO: 53147 - DNA, 29 bp, Homo Sapiens
gtcgctggttcgattccggctcgaaggac

SEQ ID NO: 53148 - DNA, 20 bp, Homo Sapiens
gagtggttaaggcattggac

SEQ ID NO: 53149 - DNA, 28 bp, Homo Sapiens
ttgtgggttcgagtcccaccagagtcgc

SEQ ID NO: 53150 - DNA, 30 bp, Homo Sapiens; identical to SEQ ID NO: 1566

SEQ ID NO: 53151 - DNA, 22 bp, Homo Sapiens
gggttcgactcccggtatggga

SEQ ID NO: 53152 - DNA, 25 bp, Homo Sapiens
gcgggttcgaaccccgtccgtgcct

SEQ ID NO: 53153 - DNA, 36 bp, Homo Sapiens; identical to SEQ ID NO: 11790

SEQ ID NO: 53154 - DNA, 26 bp, Homo Sapiens
cctcggttcgaatccgagtcacggca

SEQ ID NO: 53155 - DNA, 20 bp, Homo Sapiens
tcgaatcccagtagagcctc

SEQ ID NO: 53156 - DNA, 26 bp, Homo Sapiens
cgtgttcaaatcacgtcggggtcacc

SEQ ID NO: 53157 - DNA, 20 bp, Homo Sapiens
cgggttcgactcccggtgtg

SEQ ID NO: 53158 - DNA, 40 bp, Homo Sapiens; identical to SEQ ID NO: 11506

SEQ ID NO: 53159 - DNA, 25 bp, Homo Sapiens
cgtgttcaaatcacgtcggggtcac

SEQ ID NO: 53160 - DNA, 31 bp, Homo Sapiens; identical to SEQ ID NO: 10480

SEQ ID NO: 53161 - DNA, 38 bp, Homo Sapiens; identical to SEQ ID NO: 28300

SEQ ID NO: 53162 - DNA, 26 bp, Homo Sapiens
ctggttcgatcccgggtttcggcacc

SEQ ID NO: 53163 - DNA, 28 bp, Homo Sapiens
cgcagaaggtcctgggttcgagccccag

SEQ ID NO: 53164 - DNA, 25 bp, Homo Sapiens
aggcggcccgggttcgactcccggt

SEQ ID NO: 53165 - DNA, 32 bp, Homo Sapiens; identical to SEQ ID NO: 5157

SEQ ID NO: 53166 - DNA, 44 bp, Homo Sapiens; identical to SEQ ID NO: 4242

SEQ ID NO: 53167 - DNA, 32 bp, Homo Sapiens; identical to SEQ ID NO: 17569

SEQ ID NO: 53168 - DNA, 29 bp, Homo Sapiens
agattgcaggttcgagtcctgccgcggtc

SEQ ID NO: 53169 - DNA, 29 bp, Homo Sapiens
aggatggggtgtgataggtggcacggaga

SEQ ID NO: 53170 - DNA, 32 bp, Homo Sapiens; identical to SEQ ID NO: 12458

SEQ ID NO: 53171 - DNA, 38 bp, Homo Sapiens; identical to SEQ ID NO: 19939

SEQ ID NO: 53172 - DNA, 43 bp, Homo Sapiens; identical to SEQ ID NO: 42190

SEQ ID NO: 53173 - DNA, 41 bp, Homo Sapiens; identical to SEQ ID NO: 18202

SEQ ID NO: 53174 - DNA, 41 bp, Homo Sapiens; identical to SEQ ID NO: 19531

SEQ ID NO: 53175 - DNA, 34 bp, Homo Sapiens; identical to SEQ ID NO: 22746

SEQ ID NO: 53176 - DNA, 34 bp, Homo Sapiens; identical to SEQ ID NO: 10160

SEQ ID NO: 53177 - DNA, 33 bp, Homo Sapiens; identical to SEQ ID NO: 20345

SEQ ID NO: 53178 - DNA, 26 bp, Homo Sapiens
tgggttcgaatcccaccttcgtcgcc

SEQ ID NO: 53179 - DNA, 31 bp, Homo Sapiens; identical to SEQ ID NO: 15176

SEQ ID NO: 53180 - DNA, 32 bp, Homo Sapiens; identical to SEQ ID NO: 8715

SEQ ID NO: 53181 - DNA, 27 bp, Homo Sapiens
gcgtgggttcgaatcccatcctcgtcg

SEQ ID NO: 53182 - DNA, 34 bp, Homo Sapiens; identical to SEQ ID NO: 11168

SEQ ID NO: 53183 - DNA, 37 bp, Homo Sapiens; identical to SEQ ID NO: 8944

SEQ ID NO: 53184 - DNA, 31 bp, Homo Sapiens; identical to SEQ ID NO: 38652

SEQ ID NO: 53185 - DNA, 34 bp, Homo Sapiens; identical to SEQ ID NO: 5860

SEQ ID NO: 53186 - DNA, 42 bp, Homo Sapiens; identical to SEQ ID NO: 41602

SEQ ID NO: 53187 - DNA, 20 bp, Homo Sapiens
cgatgcccgcattctccacc

SEQ ID NO: 53188 - DNA, 37 bp, Homo Sapiens; identical to SEQ ID NO: 9195

SEQ ID NO: 53189 - DNA, 34 bp, Homo Sapiens; identical to SEQ ID NO: 30117

SEQ ID NO: 53190 - DNA, 25 bp, Homo Sapiens
tgggttcgaatcccagcggggcctc

SEQ ID NO: 53191 - DNA, 33 bp, Homo Sapiens; identical to SEQ ID NO: 26788

SEQ ID NO: 53192 - DNA, 32 bp, Homo Sapiens; identical to SEQ ID NO: 8367

SEQ ID NO: 53193 - DNA, 17 bp, Homo Sapiens
gttcaaatccaggtgcc

SEQ ID NO: 53194 - DNA, 21 bp, Homo Sapiens
gcaatggtagcgcgtctgact

SEQ ID NO: 53195 - DNA, 25 bp, Homo Sapiens
gggttcgaatcccaccgctgccacc

SEQ ID NO: 53196 - DNA, 36 bp, Homo Sapiens; identical to SEQ ID NO: 34630

SEQ ID NO: 53197 - DNA, 17 bp, Homo Sapiens
gccaaggtcgcgggttc

SEQ ID NO: 53198 - DNA, 43 bp, Homo Sapiens; identical to SEQ ID NO: 41033

SEQ ID NO: 53199 - DNA, 25 bp, Homo Sapiens
cgagttcgaatctcggtgggacctc

SEQ ID NO: 53200 - DNA, 45 bp, Homo Sapiens; identical to SEQ ID NO: 4700

SEQ ID NO: 53201 - DNA, 38 bp, Homo Sapiens; identical to SEQ ID NO: 38057

SEQ ID NO: 53202 - DNA, 29 bp, Homo Sapiens
gcgtgggttcgaatcccaccttcgtcgcc

SEQ ID NO: 53203 - DNA, 21 bp, Homo Sapiens
ggttcaaatccgggtgccccc

SEQ ID NO: 53204 - DNA, 39 bp, Homo Sapiens; identical to SEQ ID NO: 19940

SEQ ID NO: 53205 - DNA, 24 bp, Homo Sapiens
ggttcgatcccgggtttcggcacc

SEQ ID NO: 53206 - DNA, 17 bp, Homo Sapiens
cccatatggtctagcgg

SEQ ID NO: 53207 - DNA, 17 bp, Homo Sapiens
cagagtggcgcagcgga

SEQ ID NO: 53208 - DNA, 45 bp, Homo Sapiens; identical to SEQ ID NO: 32206

SEQ ID NO: 53209 - DNA, 29 bp, Homo Sapiens
tcagtcggtagagcatgagactcttaatc

SEQ ID NO: 53210 - DNA, 41 bp, Homo Sapiens; identical to SEQ ID NO: 12419

SEQ ID NO: 53211 - DNA, 19 bp, Homo Sapiens
caagtctcggtggaacctc

SEQ ID NO: 53212 - DNA, 33 bp, Homo Sapiens; identical to SEQ ID NO: 8581

SEQ ID NO: 53213 - DNA, 43 bp, Homo Sapiens; identical to SEQ ID NO: 25543

SEQ ID NO: 53214 - DNA, 29 bp, Homo Sapiens
cactctggactttgaatccagcgatccga

SEQ ID NO: 53215 - DNA, 16 bp, Homo Sapiens
ttcggcgctctcaccg

SEQ ID NO: 53216 - DNA, 32 bp, Homo Sapiens; identical to SEQ ID NO: 5956

SEQ ID NO: 53217 - DNA, 31 bp, Homo Sapiens; identical to SEQ ID NO: 26956

SEQ ID NO: 53218 - DNA, 28 bp, Homo Sapiens
cctggtggtctagtggctaggattcggc

SEQ ID NO: 53219 - DNA, 16 bp, Homo Sapiens
ggttaaggcattggac

SEQ ID NO: 53220 - DNA, 18 bp, Homo Sapiens
cgagccccacgttgggcg

SEQ ID NO: 53221 - DNA, 16 bp, Homo Sapiens
tcagtctcataatctg

SEQ ID NO: 53222 - DNA, 16 bp, Homo Sapiens
cgttcggctgttaacc

SEQ ID NO: 53223 - DNA, 30 bp, Homo Sapiens; identical to SEQ ID NO: 28193

SEQ ID NO: 53224 - DNA, 19 bp, Homo Sapiens
cggtagagcatgagactct

SEQ ID NO: 53225 - DNA, 17 bp, Homo Sapiens
aaccaggcggaaacacc

SEQ ID NO: 53226 - DNA, 21 bp, Homo Sapiens
gcaatggatagcgcattggac

SEQ ID NO: 53227 - DNA, 16 bp, Homo Sapiens
ccatatggtctagcgg

SEQ ID NO: 53228 - DNA, 16 bp, Homo Sapiens
ggtagagcagaggact

SEQ ID NO: 53229 - DNA, 45 bp, Homo Sapiens; identical to SEQ ID NO: 19945

SEQ ID NO: 53230 - DNA, 42 bp, Homo Sapiens; identical to SEQ ID NO: 19943

SEQ ID NO: 53231 - DNA, 26 bp, Homo Sapiens
cgtgttcgaatcacgtcggggtcacc

SEQ ID NO: 53232 - DNA, 22 bp, Homo Sapiens
aagattgagggttcgagtccct

SEQ ID NO: 53233 - DNA, 26 bp, Homo Sapiens
caggttcgaaccctgctcgctgcgcc

SEQ ID NO: 53234 - DNA, 38 bp, Homo Sapiens; identical to SEQ ID NO: 7116

SEQ ID NO: 53235 - DNA, 34 bp, Homo Sapiens; identical to SEQ ID NO: 9470

SEQ ID NO: 53236 - DNA, 39 bp, Homo Sapiens; identical to SEQ ID NO: 30826

SEQ ID NO: 53237 - DNA, 30 bp, Homo Sapiens; identical to SEQ ID NO: 14908

SEQ ID NO: 53238 - DNA, 18 bp, Homo Sapiens
aatcctgctcacagcgcc

SEQ ID NO: 53239 - DNA, 34 bp, Homo Sapiens; identical to SEQ ID NO: 25932

SEQ ID NO: 53240 - DNA, 21 bp, Homo Sapiens
aggtggcccgggttcgactcc

SEQ ID NO: 53241 - DNA, 39 bp, Homo Sapiens; identical to SEQ ID NO: 23349

SEQ ID NO: 53242 - DNA, 39 bp, Homo Sapiens; identical to SEQ ID NO: 17808

SEQ ID NO: 53243 - DNA, 23 bp, Homo Sapiens
gggttcgaatcccttcgtggttg

SEQ ID NO: 53244 - DNA, 36 bp, Homo Sapiens; identical to SEQ ID NO: 3549

SEQ ID NO: 53245 - DNA, 23 bp, Homo Sapiens
agttcgaatctcggtgggacctc

SEQ ID NO: 53246 - DNA, 34 bp, Homo Sapiens; identical to SEQ ID NO: 42258

SEQ ID NO: 53247 - DNA, 18 bp, Homo Sapiens
tcagaagattccaggttc

SEQ ID NO: 53248 - DNA, 22 bp, Homo Sapiens
tagagcatgagactcttaatct

SEQ ID NO: 53249 - DNA, 20 bp, Homo Sapiens
cgaatcctgttcgtgacgcc

SEQ ID NO: 53250 - DNA, 47 bp, Homo Sapiens; identical to SEQ ID NO: 8258

SEQ ID NO: 53251 - DNA, 21 bp, Homo Sapiens
gtcggtagagcatgagactct

SEQ ID NO: 53252 - DNA, 35 bp, Homo Sapiens; identical to SEQ ID NO: 14588

SEQ ID NO: 53253 - DNA, 37 bp, Homo Sapiens; identical to SEQ ID NO: 14224

SEQ ID NO: 53254 - DNA, 20 bp, Homo Sapiens
tgactccagatcagaaggct

SEQ ID NO: 53255 - DNA, 21 bp, Homo Sapiens
gcggcccgggttcgattcccg

SEQ ID NO: 53256 - DNA, 27 bp, Homo Sapiens
aggagcttaaacccccttatttctacc

SEQ ID NO: 53257 - DNA, 25 bp, Homo Sapiens
aggttcgaatcctgccgactacgcc

SEQ ID NO: 53258 - DNA, 26 bp, Homo Sapiens
caggttcgaatcctgccgactacgcc

SEQ ID NO: 53259 - DNA, 25 bp, Homo Sapiens
cgagttcaaatctcgctggggcctc

SEQ ID NO: 53260 - DNA, 32 bp, Homo Sapiens; identical to SEQ ID NO: 9989

SEQ ID NO: 53261 - DNA, 27 bp, Homo Sapiens
cggttaggattcctggttttcacccag

SEQ ID NO: 53262 - DNA, 25 bp, Homo Sapiens
gggttcgaatcccttcgtggttgcc

SEQ ID NO: 53263 - DNA, 20 bp, Homo Sapiens
ttcgaatcctgccgactacg

SEQ ID NO: 53264 - DNA, 17 bp, Homo Sapiens
tcgtatagtggttagta

SEQ ID NO: 53265 - DNA, 46 bp, Homo Sapiens; identical to SEQ ID NO: 10365

SEQ ID NO: 53266 - DNA, 34 bp, Homo Sapiens; identical to SEQ ID NO: 4922

SEQ ID NO: 53267 - DNA, 22 bp, Homo Sapiens
ttcgagtcctgccgcggtcgcc

SEQ ID NO: 53268 - DNA, 44 bp, Homo Sapiens; identical to SEQ ID NO: 13883

SEQ ID NO: 53269 - DNA, 29 bp, Homo Sapiens
gctagctcagtcggtagagcatgagactc

SEQ ID NO: 53270 - DNA, 21 bp, Homo Sapiens
agggattgtgggttcgagtcc

SEQ ID NO: 53271 - DNA, 38 bp, Homo Sapiens; identical to SEQ ID NO: 2930

SEQ ID NO: 53272 - DNA, 16 bp, Homo Sapiens
aaaggtccctggttcg

SEQ ID NO: 53273 - DNA, 24 bp, Homo Sapiens
cagctaaataagctatcgggccca

SEQ ID NO: 53274 - DNA, 33 bp, Homo Sapiens; identical to SEQ ID NO: 16830

SEQ ID NO: 53275 - DNA, 25 bp, Homo Sapiens
cgagttcaaatctcggtggaacctc

SEQ ID NO: 53276 - DNA, 31 bp, Homo Sapiens; identical to SEQ ID NO: 18659

SEQ ID NO: 53277 - DNA, 19 bp, Homo Sapiens
gttcgattcccggccaatg

SEQ ID NO: 53278 - DNA, 37 bp, Homo Sapiens; identical to SEQ ID NO: 24651

SEQ ID NO: 53279 - DNA, 16 bp, Homo Sapiens
ccccactcctggtacc

SEQ ID NO: 53280 - DNA, 17 bp, Homo Sapiens
gtggtatcatgcaagat

SEQ ID NO: 53281 - DNA, 27 bp, Homo Sapiens
tctaggttcgactcctggctggctcgc

SEQ ID NO: 53282 - DNA, 39 bp, Homo Sapiens; identical to SEQ ID NO: 8314

SEQ ID NO: 53283 - DNA, 23 bp, Homo Sapiens
ttccccgcacaggttcgaatcct

SEQ ID NO: 53284 - DNA, 28 bp, Homo Sapiens
cgatggatcgaaaccatcctctgctacc

SEQ ID NO: 53285 - DNA, 38 bp, Homo Sapiens; identical to SEQ ID NO: 3099

SEQ ID NO: 53286 - DNA, 39 bp, Homo Sapiens; identical to SEQ ID NO: 3177

SEQ ID NO: 53287 - DNA, 19 bp, Homo Sapiens
ccaacttacacttaggaga

SEQ ID NO: 53288 - DNA, 41 bp, Homo Sapiens; identical to SEQ ID NO: 8330

SEQ ID NO: 53289 - DNA, 31 bp, Homo Sapiens; identical to SEQ ID NO: 18802

SEQ ID NO: 53290 - DNA, 26 bp, Homo Sapiens
tgggttcgaatcccatcctcgtcgcc

SEQ ID NO: 53291 - DNA, 18 bp, Homo Sapiens
cgaatcccactcctgaca

SEQ ID NO: 53292 - DNA, 18 bp, Homo Sapiens
tttgggtgcgagaggtcc

SEQ ID NO: 53293 - DNA, 38 bp, Homo Sapiens; identical to SEQ ID NO: 8486

SEQ ID NO: 53294 - DNA, 31 bp, Homo Sapiens; identical to SEQ ID NO: 19932

SEQ ID NO: 53295 - DNA, 22 bp, Homo Sapiens
tccccgcgcaggttcgaatcct

SEQ ID NO: 53296 - DNA, 23 bp, Homo Sapiens
ggttcaagtccctgttcgggcgc

SEQ ID NO: 53297 - DNA, 25 bp, Homo Sapiens
gcctggatagctcagttggtagagc

SEQ ID NO: 53298 - DNA, 24 bp, Homo Sapiens
cagtggtagaattctcgcctgcca

SEQ ID NO: 53299 - DNA, 17 bp, Homo Sapiens
tggtcatcacgttcgcc

SEQ ID NO: 53300 - DNA, 17 bp, Homo Sapiens
atggataaggcattggc

SEQ ID NO: 53301 - DNA, 19 bp, Homo Sapiens
aagtcacgtcggggtcacc

SEQ ID NO: 53302 - DNA, 18 bp, Homo Sapiens
cccacatggtctagcggt

SEQ ID NO: 53303 - DNA, 29 bp, Homo Sapiens
ttggtggttcgagcccacccagggacgcc

SEQ ID NO: 53304 - DNA, 22 bp, Homo Sapiens
ttcaaatcacgtcggggtcacc

SEQ ID NO: 53305 - DNA, 26 bp, Homo Sapiens
tggtgtaatggtaagcactctggact

SEQ ID NO: 53306 - DNA, 29 bp, Homo Sapiens
ctgcgtgttcgaatcacgtcggggtcacc

SEQ ID NO: 53307 - DNA, 37 bp, Homo Sapiens; identical to SEQ ID NO: 19699

SEQ ID NO: 53308 - DNA, 19 bp, Homo Sapiens
gatcccgggtttcggcacc

SEQ ID NO: 53309 - DNA, 37 bp, Homo Sapiens; identical to SEQ ID NO: 25707

SEQ ID NO: 53310 - DNA, 46 bp, Homo Sapiens; identical to SEQ ID NO: 7964

SEQ ID NO: 53311 - DNA, 47 bp, Homo Sapiens; identical to SEQ ID NO: 9935

SEQ ID NO: 53312 - DNA, 25 bp, Homo Sapiens
tagtgtagtggttatcacgttcgcc

SEQ ID NO: 53313 - DNA, 26 bp, Homo Sapiens
gggttcgactcccggtgtgggaacca

SEQ ID NO: 53314 - DNA, 16 bp, Homo Sapiens
ccctgctcgctgcgcc

SEQ ID NO: 53315 - DNA, 27 bp, Homo Sapiens
ggggatgtagctcagtggtagagcgcg

SEQ ID NO: 53316 - DNA, 27 bp, Homo Sapiens
cgcgggttcgatccccgtacgggccac

SEQ ID NO: 53317 - DNA, 21 bp, Homo Sapiens
aagaactgctaactcatgccc

SEQ ID NO: 53318 - DNA, 16 bp, Homo Sapiens
ggccggttagctcagt

SEQ ID NO: 53319 - DNA, 28 bp, Homo Sapiens
gggggtgtagctcagtggtagagcgcgt

SEQ ID NO: 53320 - DNA, 22 bp, Homo Sapiens
gggttcgattccccgacgggga

SEQ ID NO: 53321 - DNA, 28 bp, Homo Sapiens
gcgccgctggtgtagtggtatcatgcaa

SEQ ID NO: 53322 - DNA, 32 bp, Homo Sapiens; identical to SEQ ID NO: 42246

SEQ ID NO: 53323 - DNA, 25 bp, Homo Sapiens
tcggctgttaaccgaaaggttggtg

SEQ ID NO: 53324 - DNA, 17 bp, Homo Sapiens
tagtcgtggccgagtgg

SEQ ID NO: 53325 - DNA, 22 bp, Homo Sapiens
agtggttaggattcggcgctct

SEQ ID NO: 53326 - DNA, 27 bp, Homo Sapiens
ggggatgtagctcagtggtagagcgca

SEQ ID NO: 53327 - DNA, 27 bp, Homo Sapiens
gttcagtggtagaattctcgcctgcca

SEQ ID NO: 53328 - DNA, 16 bp, Homo Sapiens
cccggtgtgggaacca

SEQ ID NO: 53329 - DNA, 19 bp, Homo Sapiens
aatcctgccgactacgcca

SEQ ID NO: 53330 - DNA, 27 bp, Homo Sapiens
ctccgaggtgattttcatattgaattg

SEQ ID NO: 53331 - DNA, 31 bp, Homo Sapiens; identical to SEQ ID NO: 1255

SEQ ID NO: 53332 - DNA, 21 bp, Homo Sapiens
tcgaatcccaccgctgccacc

SEQ ID NO: 53333 - DNA, 18 bp, Homo Sapiens
ggctagctcagtcggtag

SEQ ID NO: 53334 - DNA, 16 bp, Homo Sapiens
ccgggcagaagcacca

SEQ ID NO: 53335 - DNA, 16 bp, Homo Sapiens
tagtggttaggattcg

SEQ ID NO: 53336 - DNA, 16 bp, Homo Sapiens
tagctcagtcggtaga

SEQ ID NO: 53337 - DNA, 30 bp, Homo Sapiens; identical to SEQ ID NO: 25296

SEQ ID NO: 53338 - DNA, 32 bp, Homo Sapiens; identical to SEQ ID NO: 132

SEQ ID NO: 53339 - DNA, 33 bp, Homo Sapiens; identical to SEQ ID NO: 10729

SEQ ID NO: 53340 - DNA, 36 bp, Homo Sapiens; identical to SEQ ID NO: 9472

SEQ ID NO: 53341 - DNA, 36 bp, Homo Sapiens; identical to SEQ ID NO: 2957

SEQ ID NO: 53342 - DNA, 17 bp, Homo Sapiens
ggtagaattctcgcctg

SEQ ID NO: 53343 - DNA, 16 bp, Homo Sapiens
cctgctcacagcgcca

SEQ ID NO: 53344 - DNA, 33 bp, Homo Sapiens; identical to SEQ ID NO: 25909

SEQ ID NO: 53345 - DNA, 17 bp, Homo Sapiens
accgggcagaagcacca

SEQ ID NO: 53346 - DNA, 36 bp, Homo Sapiens; identical to SEQ ID NO: 24045

SEQ ID NO: 53347 - DNA, 21 bp, Homo Sapiens
gtttccgtagtgtagtggtca

SEQ ID NO: 53348 - DNA, 30 bp, Homo Sapiens; identical to SEQ ID NO: 24039

SEQ ID NO: 53349 - DNA, 33 bp, Homo Sapiens; identical to SEQ ID NO: 22518

SEQ ID NO: 53350 - DNA, 23 bp, Homo Sapiens
ggttagcactctggactttgaat

SEQ ID NO: 53351 - DNA, 21 bp, Homo Sapiens
cgaaaccgggcggaaacacca

SEQ ID NO: 53352 - DNA, 18 bp, Homo Sapiens
gtggttatcacgttcgcc

SEQ ID NO: 53353 - DNA, 28 bp, Homo Sapiens
ggggatgtagctcagtggtagagcgcgc

SEQ ID NO: 53354 - DNA, 30 bp, Homo Sapiens; identical to SEQ ID NO: 18658

SEQ ID NO: 53355 - DNA, 27 bp, Homo Sapiens
gggggtgtagctcagtggtagagcgcg

SEQ ID NO: 53356 - DNA, 20 bp, Homo Sapiens
cgattccggctcgaaggacc

SEQ ID NO: 53357 - DNA, 17 bp, Homo Sapiens
gcccggatagctcagtc

SEQ ID NO: 53358 - DNA, 16 bp, Homo Sapiens
cccggcccatgcacca

SEQ ID NO: 53359 - DNA, 17 bp, Homo Sapiens
tccgagtcacggcacca

SEQ ID NO: 53360 - DNA, 20 bp, Homo Sapiens
cggttaggattcctggtttt

SEQ ID NO: 53361 - DNA, 22 bp, Homo Sapiens
gactctgaatccagcgatccga

SEQ ID NO: 53362 - DNA, 20 bp, Homo Sapiens
tacgaccccttatttacccc

SEQ ID NO: 53363 - DNA, 16 bp, Homo Sapiens
cccgtccgtgcctcca

SEQ ID NO: 53364 - DNA, 21 bp, Homo Sapiens
cgaatcccatcctcgtcgcca

SEQ ID NO: 53365 - DNA, 17 bp, Homo Sapiens
accatcctctgctacca

SEQ ID NO: 53366 - DNA, 27 bp, Homo Sapiens
gtttccgtagtgtagtggttatcacgt

SEQ ID NO: 53367 - DNA, 22 bp, Homo Sapiens
aatggttagcactctggactct

SEQ ID NO: 53368 - DNA, 17 bp, Homo Sapiens
tgcccgcatcctccacc

SEQ ID NO: 53369 - DNA, 23 bp, Homo Sapiens
ttgggtgcgagaggtcccgggtt

SEQ ID NO: 53370 - DNA, 23 bp, Homo Sapiens
gggccagtggcgcaatggataac

SEQ ID NO: 53371 - DNA, 19 bp, Homo Sapiens
gtagtcgtggccgagtggt

SEQ ID NO: 53372 - DNA, 19 bp, Homo Sapiens
ttggtggttcagtggtaga

SEQ ID NO: 53373 - DNA, 17 bp, Homo Sapiens
accgggcggaaacacca

SEQ ID NO: 53374 - DNA, 17 bp, Homo Sapiens
cactgtaaagctaactt

SEQ ID NO: 53375 - DNA, 23 bp, Homo Sapiens
ctaacaacatggctttctcacca

SEQ ID NO: 53376 - DNA, 29 bp, Homo Sapiens
ggcggcccgggttcgactcccggtgtggg

SEQ ID NO: 53377 - DNA, 29 bp, Homo Sapiens
taggatggggtgtgataggtggcacggag

SEQ ID NO: 53378 - DNA, 18 bp, Homo Sapiens
tggtagaattctcgcctg

SEQ ID NO: 53379 - DNA, 17 bp, Homo Sapiens
ccccgtccgtgcctcca

SEQ ID NO: 53380 - DNA, 23 bp, Homo Sapiens
atggttagcactctggactctga

SEQ ID NO: 53381 - DNA, 18 bp, Homo Sapiens
gaccgcgtggcctaatgg

SEQ ID NO: 53382 - DNA, 26 bp, Homo Sapiens
cgtgatcgtatagtggttagtactct

SEQ ID NO: 53383 - DNA, 17 bp, Homo Sapiens
ccctgctcgctgcgcca

SEQ ID NO: 53384 - DNA, 22 bp, Homo Sapiens
ggttagcactctggactctgaa

SEQ ID NO: 53385 - DNA, 17 bp, Homo Sapiens
tcctgctcacagcgcca

SEQ ID NO: 53386 - DNA, 26 bp, Homo Sapiens
attggtcgtggttgtagtccgtgcga

SEQ ID NO: 53387 - DNA, 18 bp, Homo Sapiens
atcctgctcacagcgcca

SEQ ID NO: 53388 - DNA, 19 bp, Homo Sapiens
ggccggttagctcagttgg

SEQ ID NO: 53389 - DNA, 26 bp, Homo Sapiens
gtgatcgtatagtggttagtactctg

SEQ ID NO: 53390 - DNA, 23 bp, Homo Sapiens
tttgggtgcgagaggtcccgggt

SEQ ID NO: 53391 - DNA, 17 bp, Homo Sapiens
aatggttagcactctgg

SEQ ID NO: 53392 - DNA, 20 bp, Homo Sapiens
agtggttagtactctgcgtt

SEQ ID NO: 53393 - DNA, 30 bp, Homo Sapiens; identical to SEQ ID NO: 4283

SEQ ID NO: 53394 - DNA, 20 bp, Homo Sapiens
tgtaatggttagcactctgg

SEQ ID NO: 53395 - DNA, 22 bp, Homo Sapiens
tcgtatagtggttagtactctg

SEQ ID NO: 53396 - DNA, 22 bp, Homo Sapiens
gttaagatggcagagcccggta

SEQ ID NO: 53397 - DNA, 21 bp, Homo Sapiens
attggtcgtggttgtagtccg

SEQ ID NO: 53398 - DNA, 18 bp, Homo Sapiens
ttcaggtcgcagtctccc

SEQ ID NO: 53399 - DNA, 26 bp, Homo Sapiens
tcaacttaacttgaccgctctgacca

SEQ ID NO: 53400 - DNA, 18 bp, Homo Sapiens
acttgaccgctctgacca

SEQ ID NO: 53401 - DNA, 32 bp, Homo Sapiens; identical to SEQ ID NO: 8225

SEQ ID NO: 53402 - DNA, 43 bp, Homo Sapiens; identical to SEQ ID NO: 35270

SEQ ID NO: 53403 - DNA, 47 bp, Homo Sapiens; identical to SEQ ID NO: 11328

SEQ ID NO: 53404 - DNA, 27 bp, Homo Sapiens
gactccagatcagaaggctgcgtgttc

SEQ ID NO: 53405 - DNA, 28 bp, Homo Sapiens
agctcacaagaactgctaactcatgccc

SEQ ID NO: 53406 - DNA, 40 bp, Homo Sapiens; identical to SEQ ID NO: 12892

SEQ ID NO: 53407 - DNA, 33 bp, Homo Sapiens; identical to SEQ ID NO: 12208

SEQ ID NO: 53408 - DNA, 34 bp, Homo Sapiens; identical to SEQ ID NO: 5022

SEQ ID NO: 53409 - DNA, 31 bp, Homo Sapiens; identical to SEQ ID NO: 15332

SEQ ID NO: 53410 - DNA, 26 bp, Homo Sapiens
ttaaccgaaaggttggtggttcgagc

SEQ ID NO: 53411 - DNA, 28 bp, Homo Sapiens
tagtgtagtggttatcacgtctgcttta

SEQ ID NO: 53412 - DNA, 43 bp, Homo Sapiens; identical to SEQ ID NO: 22582

SEQ ID NO: 53413 - DNA, 36 bp, Homo Sapiens; identical to SEQ ID NO: 8601

SEQ ID NO: 53414 - DNA, 19 bp, Homo Sapiens
cgatccccgtacgggccac

SEQ ID NO: 53415 - DNA, 31 bp, Homo Sapiens; identical to SEQ ID NO: 37579

SEQ ID NO: 53416 - DNA, 32 bp, Homo Sapiens; identical to SEQ ID NO: 37580

SEQ ID NO: 53417 - DNA, 23 bp, Homo Sapiens
agcagcttcaaacctgccggggc

SEQ ID NO: 53418 - DNA, 25 bp, Homo Sapiens
cggagaattttggattctcagggat

SEQ ID NO: 53419 - DNA, 16 bp, Homo Sapiens
agaaggctgcgtgttc

SEQ ID NO: 53420 - DNA, 30 bp, Homo Sapiens; identical to SEQ ID NO: 3776

SEQ ID NO: 53421 - DNA, 18 bp, Homo Sapiens
gcgtggccgagcggtcta

SEQ ID NO: 53422 - DNA, 19 bp, Homo Sapiens
agccagggattgtgggttc

SEQ ID NO: 53423 - DNA, 37 bp, Homo Sapiens; identical to SEQ ID NO: 22687

SEQ ID NO: 53424 - DNA, 37 bp, Homo Sapiens; identical to SEQ ID NO: 9473

SEQ ID NO: 53425 - DNA, 44 bp, Homo Sapiens; identical to SEQ ID NO: 218

SEQ ID NO: 53426 - DNA, 37 bp, Homo Sapiens; identical to SEQ ID NO: 24830

SEQ ID NO: 53427 - DNA, 33 bp, Homo Sapiens; identical to SEQ ID NO: 30462

SEQ ID NO: 53428 - DNA, 33 bp, Homo Sapiens; identical to SEQ ID NO: 16890

SEQ ID NO: 53429 - DNA, 39 bp, Homo Sapiens; identical to SEQ ID NO: 24832

SEQ ID NO: 53430 - DNA, 37 bp, Homo Sapiens; identical to SEQ ID NO: 10522

SEQ ID NO: 53431 - DNA, 35 bp, Homo Sapiens; identical to SEQ ID NO: 12110

SEQ ID NO: 53432 - DNA, 38 bp, Homo Sapiens; identical to SEQ ID NO: 16291

SEQ ID NO: 53433 - DNA, 26 bp, Homo Sapiens
agaagcagcttcaaacctgccggggc

SEQ ID NO: 53434 - DNA, 26 bp, Homo Sapiens
ggagaccggggttcgattccccgacg

SEQ ID NO: 53435 - DNA, 17 bp, Homo Sapiens
acgcgggagaccggggt

SEQ ID NO: 53436 - DNA, 19 bp, Homo Sapiens
attgcaggttcgagtcctg

SEQ ID NO: 53437 - DNA, 32 bp, Homo Sapiens; identical to SEQ ID NO: 18795

SEQ ID NO: 53438 - DNA, 26 bp, Homo Sapiens
gaagcagcttcaaacctgccggggct

SEQ ID NO: 53439 - DNA, 32 bp, Homo Sapiens; identical to SEQ ID NO: 15365

SEQ ID NO: 53440 - DNA, 17 bp, Homo Sapiens
gttcaatccccggcacc

SEQ ID NO: 53441 - DNA, 16 bp, Homo Sapiens
caggatggccgagcgg

SEQ ID NO: 53442 - DNA, 22 bp, Homo Sapiens
cggcccgggttcgattcccggt

SEQ ID NO: 53443 - DNA, 23 bp, Homo Sapiens
agtggtagaattctcgcctgcca

SEQ ID NO: 53444 - DNA, 16 bp, Homo Sapiens
gaagcgtgctgggccc

SEQ ID NO: 53445 - DNA, 27 bp, Homo Sapiens
gtcggtagagcatgggactcttaatcc

SEQ ID NO: 53446 - DNA, 31 bp, Homo Sapiens; identical to SEQ ID NO: 20675

SEQ ID NO: 53447 - DNA, 34 bp, Homo Sapiens; identical to SEQ ID NO: 13076

SEQ ID NO: 53448 - DNA, 35 bp, Homo Sapiens; identical to SEQ ID NO: 4153

SEQ ID NO: 53449 - DNA, 32 bp, Homo Sapiens; identical to SEQ ID NO: 18195

SEQ ID NO: 53450 - DNA, 19 bp, Homo Sapiens
cctgtcacgcgggagaccg

SEQ ID NO: 53451 - DNA, 16 bp, Homo Sapiens
agttctggtctccgga

SEQ ID NO: 53452 - DNA, 17 bp, Homo Sapiens
aggattcggcgctctca

SEQ ID NO: 53453 - DNA, 27 bp, Homo Sapiens
agtggttatcacgttcgcctcacacgc

SEQ ID NO: 53454 - DNA, 32 bp, Homo Sapiens; identical to SEQ ID NO: 26041

SEQ ID NO: 53455 - DNA, 34 bp, Homo Sapiens; identical to SEQ ID NO: 12109

SEQ ID NO: 53456 - DNA, 25 bp, Homo Sapiens
acatggtctagcggttaggattcct

SEQ ID NO: 53457 - DNA, 34 bp, Homo Sapiens; identical to SEQ ID NO: 17923

SEQ ID NO: 53458 - DNA, 25 bp, Homo Sapiens
tggtctaggggtatgattctcgctt

SEQ ID NO: 53459 - DNA, 22 bp, Homo Sapiens
ttggtctaggggtatgattctc

SEQ ID NO: 53460 - DNA, 18 bp, Homo Sapiens
aggatggccgagcggtct

SEQ ID NO: 53461 - DNA, 21 bp, Homo Sapiens
agcagagtggcgcagcggaag

SEQ ID NO: 53462 - DNA, 16 bp, Homo Sapiens
gccacgcgggaggccc

SEQ ID NO: 53463 - DNA, 17 bp, Homo Sapiens
cctgtcacgcgggagac

SEQ ID NO: 53464 - DNA, 22 bp, Homo Sapiens
tttccgtagtgtagtggtcatc

SEQ ID NO: 53465 - DNA, 36 bp, Homo Sapiens; identical to SEQ ID NO: 27564

SEQ ID NO: 53466 - DNA, 32 bp, Homo Sapiens; identical to SEQ ID NO: 18449

SEQ ID NO: 53467 - DNA, 34 bp, Homo Sapiens; identical to SEQ ID NO: 27562

SEQ ID NO: 53468 - DNA, 17 bp, Homo Sapiens
acatcagattgtgaatc

SEQ ID NO: 53469 - DNA, 38 bp, Homo Sapiens; identical to SEQ ID NO: 22793

SEQ ID NO: 53470 - DNA, 19 bp, Homo Sapiens
gtagaattctcgcctgcca

SEQ ID NO: 53471 - DNA, 16 bp, Homo Sapiens
ggccgtgatcgtatag

SEQ ID NO: 53472 - DNA, 16 bp, Homo Sapiens
gagtgaagcattggac

SEQ ID NO: 53473 - DNA, 20 bp, Homo Sapiens
ttcgagtctcggtggaacct

SEQ ID NO: 53474 - DNA, 39 bp, Homo Sapiens; identical to SEQ ID NO: 808

SEQ ID NO: 53475 - DNA, 18 bp, Homo Sapiens
ctgaatccagcgatccga

SEQ ID NO: 53476 - DNA, 18 bp, Homo Sapiens
gtcccacctggggtgcca

SEQ ID NO: 53477 - DNA, 17 bp, Homo Sapiens
ttaggattcggcgctct

SEQ ID NO: 53478 - DNA, 40 bp, Homo Sapiens; identical to SEQ ID NO: 8315

SEQ ID NO: 53479 - DNA, 17 bp, Homo Sapiens
ctgaatccagcgatccg

SEQ ID NO: 53480 - DNA, 20 bp, Homo Sapiens
atctaaaggtccctggttcg

SEQ ID NO: 53481 - DNA, 23 bp, Homo Sapiens
ccataacccagaggtcgatggat

SEQ ID NO: 53482 - DNA, 35 bp, Homo Sapiens; identical to SEQ ID NO: 16852

SEQ ID NO: 53483 - DNA, 22 bp, Homo Sapiens
caggatggccgagcggtctaag

SEQ ID NO: 53484 - DNA, 24 bp, Homo Sapiens
gttcttgtagttgaaatacaacga

SEQ ID NO: 53485 - DNA, 16 bp, Homo Sapiens
gtcaggatggccgagt

SEQ ID NO: 53486 - DNA, 24 bp, Homo Sapiens
caggatggccgagcggtctaaggc

SEQ ID NO: 53487 - DNA, 29 bp, Homo Sapiens
cctggtggtctagtggttaggattcggcg

SEQ ID NO: 53488 - DNA, 22 bp, Homo Sapiens
gggttcgattccccgacgggga

SEQ ID NO: 53489 - DNA, 21 bp, Homo Sapiens
gcttcaaacctgccggggctt

SEQ ID NO: 53490 - DNA, 17 bp, Homo Sapiens
actcaagttctggtctc

SEQ ID NO: 53491 - DNA, 16 bp, Homo Sapiens
ggtatgattctcgctt

SEQ ID NO: 53492 - DNA, 20 bp, Homo Sapiens
ctgtcacgcgggagaccggg

SEQ ID NO: 53493 - DNA, 26 bp, Homo Sapiens
agctcagtcggtagagcatgggactc

SEQ ID NO: 53494 - DNA, 30 bp, Homo Sapiens; identical to SEQ ID NO: 18370

SEQ ID NO: 53495 - DNA, 16 bp, Homo Sapiens
cggtagagcatgggac

SEQ ID NO: 53496 - DNA, 18 bp, Homo Sapiens
cggtagagcatgggactc

SEQ ID NO: 53497 - DNA, 36 bp, Homo Sapiens; identical to SEQ ID NO: 19198

SEQ ID NO: 53498 - DNA, 22 bp, Homo Sapiens
tgaatccagcgatccgagttca

SEQ ID NO: 53499 - DNA, 28 bp, Homo Sapiens
ggtaaaatggctgagtgaagcattggac

SEQ ID NO: 53500 - DNA, 18 bp, Homo Sapiens
tcagaaggctgcgtgttc

SEQ ID NO: 53501 - DNA, 27 bp, Homo Sapiens
ggccgtgatcgtatagtggttagtact

SEQ ID NO: 53502 - DNA, 27 bp, Homo Sapiens
gttcagtggtagaattctcgcctgcca

SEQ ID NO: 53503 - DNA, 31 bp, Homo Sapiens; identical to SEQ ID NO: 20364

SEQ ID NO: 53504 - DNA, 22 bp, Homo Sapiens
gtcaggatggccgagtggtcta

SEQ ID NO: 53505 - DNA, 27 bp, Homo Sapiens
tcgtggttgtagtccgtgcgagaatac

SEQ ID NO: 53506 - DNA, 18 bp, Homo Sapiens
gtcaggatggccgagtgg

SEQ ID NO: 53507 - DNA, 31 bp, Homo Sapiens; identical to SEQ ID NO: 8714

SEQ ID NO: 53508 - DNA, 23 bp, Homo Sapiens
ctgaatccagcgatccgagttca

SEQ ID NO: 53509 - DNA, 23 bp, Homo Sapiens
aagaactgctaactcatgccccc

SEQ ID NO: 53510 - DNA, 25 bp, Homo Sapiens
gtgtagtggttatcacgttcgcctc

SEQ ID NO: 53511 - DNA, 18 bp, Homo Sapiens
accaggatggccgagtgg

SEQ ID NO: 53512 - DNA, 22 bp, Homo Sapiens
tctgaatccagcgatccgagtt

SEQ ID NO: 53513 - DNA, 20 bp, Homo Sapiens
gtggttatcacgttcgcctc

SEQ ID NO: 53514 - DNA, 17 bp, Homo Sapiens
gtcggtagagcatggga

SEQ ID NO: 53515 - DNA, 36 bp, Homo Sapiens; identical to SEQ ID NO: 11014

SEQ ID NO: 53516 - DNA, 28 bp, Homo Sapiens
ccgtagtgtagtggtcatcacgttcgcc

SEQ ID NO: 53517 - DNA, 23 bp, Homo Sapiens
ccggatagctcagtcggtagagc

SEQ ID NO: 53518 - DNA, 33 bp, Homo Sapiens; identical to SEQ ID NO: 13256

SEQ ID NO: 53519 - DNA, 32 bp, Homo Sapiens; identical to SEQ ID NO: 17958

SEQ ID NO: 53520 - DNA, 22 bp, Homo Sapiens
cggctagctcagtcggtagagc

SEQ ID NO: 53521 - DNA, 36 bp, Homo Sapiens; identical to SEQ ID NO: 16838

SEQ ID NO: 53522 - DNA, 31 bp, Homo Sapiens; identical to SEQ ID NO: 19440

SEQ ID NO: 53523 - DNA, 29 bp, Homo Sapiens
ggctagctcagtcggtagagcatgggact

SEQ ID NO: 53524 - DNA, 18 bp, Homo Sapiens
tcggtagagcatgggact

SEQ ID NO: 53525 - DNA, 28 bp, Homo Sapiens
ccggctagctcagtcggtagagcatggg

SEQ ID NO: 53526 - DNA, 31 bp, Homo Sapiens; identical to SEQ ID NO: 25477

SEQ ID NO: 53527 - DNA, 31 bp, Homo Sapiens; identical to SEQ ID NO: 13558

SEQ ID NO: 53528 - DNA, 31 bp, Homo Sapiens; identical to SEQ ID NO: 2233

SEQ ID NO: 53529 - DNA, 19 bp, Homo Sapiens
tcggtagagcatgggactc

SEQ ID NO: 53530 - DNA, 31 bp, Homo Sapiens; identical to SEQ ID NO: 15584

SEQ ID NO: 53531 - DNA, 31 bp, Homo Sapiens; identical to SEQ ID NO: 11180

SEQ ID NO: 53532 - DNA, 36 bp, Homo Sapiens; identical to SEQ ID NO: 16853

SEQ ID NO: 53533 - DNA, 33 bp, Homo Sapiens; identical to SEQ ID NO: 22493

SEQ ID NO: 53534 - DNA, 33 bp, Homo Sapiens; identical to SEQ ID NO: 25533

SEQ ID NO: 53535 - DNA, 20 bp, Homo Sapiens
gtcggtagagcatgggactc

SEQ ID NO: 53536 - DNA, 32 bp, Homo Sapiens; identical to SEQ ID NO: 27988

SEQ ID NO: 53537 - DNA, 18 bp, Homo Sapiens
gttaggattcggcgctct

SEQ ID NO: 53538 - DNA, 22 bp, Homo Sapiens
ccggatagctcagtcggtagag

SEQ ID NO: 53539 - DNA, 26 bp, Homo Sapiens
gccgtgatcgtatagtggttagtact

SEQ ID NO: 53540 - DNA, 22 bp, Homo Sapiens
agtggtagaattctcgcctgcc

SEQ ID NO: 53541 - DNA, 29 bp, Homo Sapiens
cagagtggcgcagcggaagcgtgctgggc

SEQ ID NO: 53542 - DNA, 30 bp, Homo Sapiens; identical to SEQ ID NO: 11179

SEQ ID NO: 53543 - DNA, 21 bp, Homo Sapiens
tcaaatcccggacgagccccc

SEQ ID NO: 53544 - DNA, 26 bp, Homo Sapiens
tcggtagagcatgggactcttaatcc

SEQ ID NO: 53545 - DNA, 19 bp, Homo Sapiens
gtcggtagagcatgggact

SEQ ID NO: 53546 - DNA, 25 bp, Homo Sapiens
gtggcgcagcggaagcgtgctgggc

SEQ ID NO: 53547 - DNA, 24 bp, Homo Sapiens
gtctagtggttaggattcggcgct

SEQ ID NO: 53548 - DNA, 29 bp, Homo Sapiens
gtttccgtagtgtagcggttatcacattc

SEQ ID NO: 53549 - DNA, 16 bp, Homo Sapiens
atggtagagcgctcgc

SEQ ID NO: 53550 - DNA, 28 bp, Homo Sapiens
ggtggagttaaagactttttctctgacc

SEQ ID NO: 53551 - DNA, 25 bp, Homo Sapiens
gaaaaagtcatggaggccatggggt

SEQ ID NO: 53552 - DNA, 20 bp, Homo Sapiens
tcgaatcccatcctcgtcgc

SEQ ID NO: 53553 - DNA, 21 bp, Homo Sapiens
tctgaatccagcgatccgagt

SEQ ID NO: 53554 - DNA, 19 bp, Homo Sapiens
gaaaatgtttagacgggct

SEQ ID NO: 53555 - DNA, 29 bp, Homo Sapiens
tggtggagttaaagactttttctctgacc

SEQ ID NO: 53556 - DNA, 18 bp, Homo Sapiens
cattcttgcgacccgggt

SEQ ID NO: 53557 - DNA, 22 bp, Homo Sapiens
ctgaatccagcgatccgagttc

SEQ ID NO: 53558 - DNA, 29 bp, Homo Sapiens
atgttggttatacccttcccgtactacca

SEQ ID NO: 53559 - DNA, 24 bp, Homo Sapiens
agctccgaggtgattttcatattg

SEQ ID NO: 53560 - DNA, 18 bp, Homo Sapiens
actcaagttctggtctcc

SEQ ID NO: 53561 - DNA, 16 bp, Homo Sapiens
ctctgtggaacctcca

SEQ ID NO: 53562 - DNA, 19 bp, Homo Sapiens
cagtcggtagagcatggga

SEQ ID NO: 53563 - DNA, 28 bp, Homo Sapiens
tggtggagttaaagactttttctctgac

SEQ ID NO: 53564 - DNA, 17 bp, Homo Sapiens
tagaattctcgcctgcc

SEQ ID NO: 53565 - DNA, 16 bp, Homo Sapiens
ggtagaattctcgcct

SEQ ID NO: 53566 - DNA, 21 bp, Homo Sapiens
ctgaatccagcgatccgagtt

SEQ ID NO: 53567 - DNA, 23 bp, Homo Sapiens
actttgaatccagcgatccgagt

SEQ ID NO: 53568 - DNA, 21 bp, Homo Sapiens
gtggtagaattctcgcctgcc

SEQ ID NO: 53569 - DNA, 25 bp, Homo Sapiens
tggtctagtggttaggattcggcgc

SEQ ID NO: 53570 - DNA, 18 bp, Homo Sapiens
gtcggtagagcatgggac

SEQ ID NO: 53571 - DNA, 27 bp, Homo Sapiens
ggtggagttaaagactttttctctgac

SEQ ID NO: 53572 - DNA, 16 bp, Homo Sapiens
ggttaggattcggcgc

SEQ ID NO: 53573 - DNA, 23 bp, Homo Sapiens
ctttgaatccagcgatccgagtt

SEQ ID NO: 53574 - DNA, 27 bp, Homo Sapiens
gagtggcgcagcggaagcgtgctgggc

SEQ ID NO: 53575 - DNA, 24 bp, Homo Sapiens
ttggtctaggggtatgattctcgc

SEQ ID NO: 53576 - DNA, 27 bp, Homo Sapiens
atcgtatagtggttagtactctgcgtt

SEQ ID NO: 53577 - DNA, 17 bp, Homo Sapiens
tcggtagagcatgggac

SEQ ID NO: 53578 - DNA, 18 bp, Homo Sapiens
ctgccacgcgggaggccc

SEQ ID NO: 53579 - DNA, 22 bp, Homo Sapiens
ttgtagtccgtgcgagaatacc

SEQ ID NO: 53580 - DNA, 17 bp, Homo Sapiens
ctcaagttctggtctcc

SEQ ID NO: 53581 - DNA, 28 bp, Homo Sapiens
ttggtggttcagtggtagaattctcgcc

SEQ ID NO: 53582 - DNA, 22 bp, Homo Sapiens
ttgtaaaccaggggtcgcgagt

SEQ ID NO: 53583 - DNA, 18 bp, Homo Sapiens
gtggtagagcatttgact

SEQ ID NO: 53584 - DNA, 24 bp, Homo Sapiens
gtgtagtggttatcacgttcgcct

SEQ ID NO: 53585 - DNA, 19 bp, Homo Sapiens
agtggtagagcatttgact

SEQ ID NO: 53586 - DNA, 21 bp, Homo Sapiens
tcgaatcccatcctcgtcgcc

SEQ ID NO: 53587 - DNA, 23 bp, Homo Sapiens
gtttccgtagtgtagcggttatc

SEQ ID NO: 53588 - DNA, 19 bp, Homo Sapiens
agtcggtagagcatgggac

SEQ ID NO: 53589 - DNA, 19 bp, Homo Sapiens
actctggactctgaatcca

SEQ ID NO: 53590 - DNA, 30 bp, Homo Sapiens; identical to SEQ ID NO: 11496

SEQ ID NO: 53591 - DNA, 20 bp, Homo Sapiens
gagaaagctcacaagaactg

SEQ ID NO: 53592 - DNA, 17 bp, Homo Sapiens
gtttccgtagtgtagcg

SEQ ID NO: 53593 - DNA, 27 bp, Homo Sapiens
ggtggttcagtggtagaattctcgcct

SEQ ID NO: 53594 - DNA, 17 bp, Homo Sapiens
gtcaggatggccgagcg

SEQ ID NO: 53595 - DNA, 25 bp, Homo Sapiens
tccctggtggtctagtggttaggat

SEQ ID NO: 53596 - DNA, 16 bp, Homo Sapiens
gtcaggatggccgagc

SEQ ID NO: 53597 - DNA, 27 bp, Homo Sapiens
gtggagttaaagactttttctctgacc

SEQ ID NO: 53598 - DNA, 21 bp, Homo Sapiens
agcactctggactctgaatcc

SEQ ID NO: 53599 - DNA, 17 bp, Homo Sapiens
gttaagatggcagagcc

SEQ ID NO: 53600 - DNA, 25 bp, Homo Sapiens
ggagttaaagactttttctctgacc

SEQ ID NO: 53601 - DNA, 21 bp, Homo Sapiens
tatagtggttagtactctgcg

SEQ ID NO: 53602 - DNA, 20 bp, Homo Sapiens
cagtcggtagagcatgggac

SEQ ID NO: 53603 - DNA, 20 bp, Homo Sapiens
cagtggtagagcatttgact

SEQ ID NO: 53604 - DNA, 21 bp, Homo Sapiens
tcagtcggtagagcatgggac

SEQ ID NO: 53605 - DNA, 16 bp, Homo Sapiens
acttgaccgctctgac

SEQ ID NO: 53606 - DNA, 20 bp, Homo Sapiens
ctgaatccagcgatccgagt

SEQ ID NO: 53607 - DNA, 21 bp, Homo Sapiens
tcagtcggtagagcatcagac

SEQ ID NO: 53608 - DNA, 20 bp, Homo Sapiens
agcactctggactctgaatc

SEQ ID NO: 53609 - DNA, 18 bp, Homo Sapiens
gttaagatggcagagccc

SEQ ID NO: 53610 - DNA, 18 bp, Homo Sapiens
gtcaggatggccgagcgg

SEQ ID NO: 53611 - DNA, 24 bp, Homo Sapiens
gtcaggatggccgagcggtctaag

SEQ ID NO: 53612 - DNA, 21 bp, Homo Sapiens
gtcaggatggccgagcggtct

SEQ ID NO: 53613 - DNA, 17 bp, Homo Sapiens
cctctttacagtgacca

SEQ ID NO: 53614 - DNA, 20 bp, Homo Sapiens
gtcaggatggccgagcggtc

SEQ ID NO: 53615 - DNA, 22 bp, Homo Sapiens
gtcaggatggccgagcggtcta

SEQ ID NO: 53616 - DNA, 22 bp, Homo Sapiens
ctttgaatccagcgatccgagt

SEQ ID NO: 53617 - DNA, 25 bp, Homo Sapiens
cgtatagtggttagtactctgcgtt

SEQ ID NO: 53618 - DNA, 24 bp, Homo Sapiens
gcattggtggttcagtggtagaat

SEQ ID NO: 53619 - DNA, 22 bp, Homo Sapiens
ttcagtggtagaattctcgcct

SEQ ID NO: 53620 - DNA, 19 bp, Homo Sapiens
cagtggtagaattctcgcc

SEQ ID NO: 53621 - DNA, 22 bp, Homo Sapiens
tcgaaaccgggcggaaacacca

SEQ ID NO: 53622 - DNA, 26 bp, Homo Sapiens
gagaaagctcacaagaactgctaact

SEQ ID NO: 53623 - DNA, 22 bp, Homo Sapiens
gagaaagctcacaagaactgct

SEQ ID NO: 53624 - DNA, 18 bp, Homo Sapiens
ggctcgttggtctagggg

SEQ ID NO: 53625 - DNA, 18 bp, Homo Sapiens
cagtggtagaattctcgc

SEQ ID NO: 53626 - DNA, 22 bp, Homo Sapiens
tcgaatcccatcctcgtcgcca

SEQ ID NO: 53627 - DNA, 20 bp, Homo Sapiens
cagtggtagaattctcgcct

SEQ ID NO: 53628 - DNA, 22 bp, Homo Sapiens
gttaaagactttttctctgacc

SEQ ID NO: 53629 - DNA, 26 bp, Homo Sapiens
gtcaggatggccgagcggtctaaggc

SEQ ID NO: 53630 - DNA, 23 bp, Homo Sapiens
tcagtggtagaattctcgcctgc

SEQ ID NO: 53631 - DNA, 21 bp, Homo Sapiens
tcagtggtagaattctcgcct

SEQ ID NO: 53632 - DNA, 23 bp, Homo Sapiens
gtttccgtagtgtagtggtcatc

SEQ ID NO: 53633 - DNA, 25 bp, Homo Sapiens
gtagtcgtggccgagtggttaaggc

SEQ ID NO: 53634 - DNA, 23 bp, Homo Sapiens
gttcagtggtagaattctcgcct

SEQ ID NO: 53635 - DNA, 23 bp, Homo Sapiens
agttaaagactttttctctgacc

SEQ ID NO: 53636 - DNA, 25 bp, Homo Sapiens
ggttcgattccccgacggggagcca

SEQ ID NO: 53637 - DNA, 18 bp, Homo Sapiens
tggttagtactctgcgtt

SEQ ID NO: 53638 - DNA, 25 bp, Homo Sapiens
gtcaggatggccgagcggtctaagg

SEQ ID NO: 53639 - DNA, 17 bp, Homo Sapiens
agactttttctctgacc

SEQ ID NO: 53640 - DNA, 19 bp, Homo Sapiens
tggttagtactctgcgttg

SEQ ID NO: 53641 - DNA, 18 bp, Homo Sapiens
aagactttttctctgacc

SEQ ID NO: 53642 - DNA, 19 bp, Homo Sapiens
aaagactttttctctgacc

SEQ ID NO: 53643 - DNA, 18 bp, Homo Sapiens
ggggatgtagctcagtgg

SEQ ID NO: 53644 - DNA, 20 bp, Homo Sapiens
taaagactttttctctgacc

SEQ ID NO: 53645 - DNA, 18 bp, Homo Sapiens
cgaaaccgggcggaaaca

SEQ ID NO: 53646 - DNA, 17 bp, Homo Sapiens
aaaccgggcggaaacac

SEQ ID NO: 53647 - DNA, 37 bp, Homo Sapiens; identical to SEQ ID NO: 26686

SEQ ID NO: 53648 - DNA, 36 bp, Homo Sapiens; identical to SEQ ID NO: 24647

SEQ ID NO: 53649 - DNA, 33 bp, Homo Sapiens; identical to SEQ ID NO: 1379

SEQ ID NO: 53650 - DNA, 43 bp, Homo Sapiens; identical to SEQ ID NO: 7621

SEQ ID NO: 53651 - DNA, 18 bp, Homo Sapiens
gaaaccgggcggaaacac

SEQ ID NO: 53652 - DNA, 23 bp, Homo Sapiens
ggttcgaatccgagtcacggcac

SEQ ID NO: 53653 - DNA, 38 bp, Homo Sapiens; identical to SEQ ID NO: 12444

SEQ ID NO: 53654 - DNA, 36 bp, Homo Sapiens; identical to SEQ ID NO: 29983

SEQ ID NO: 53655 - DNA, 19 bp, Homo Sapiens
caatcccgggtttcggcac

SEQ ID NO: 53656 - DNA, 33 bp, Homo Sapiens; identical to SEQ ID NO: 1674

SEQ ID NO: 53657 - DNA, 17 bp, Homo Sapiens
gaaaccgggcggaaaca

SEQ ID NO: 53658 - DNA, 37 bp, Homo Sapiens; identical to SEQ ID NO: 9966

SEQ ID NO: 53659 - DNA, 38 bp, Homo Sapiens; identical to SEQ ID NO: 9967

SEQ ID NO: 53660 - DNA, 35 bp, Homo Sapiens; identical to SEQ ID NO: 8007

SEQ ID NO: 53661 - DNA, 19 bp, Homo Sapiens
cgattcccggccaacgcac

SEQ ID NO: 53662 - DNA, 37 bp, Homo Sapiens; identical to SEQ ID NO: 6717

SEQ ID NO: 53663 - DNA, 34 bp, Homo Sapiens; identical to SEQ ID NO: 29342

SEQ ID NO: 53664 - DNA, 23 bp, Homo Sapiens
ggttcgaatccggctcggaggac

SEQ ID NO: 53665 - DNA, 33 bp, Homo Sapiens; identical to SEQ ID NO: 24144

SEQ ID NO: 53666 - DNA, 31 bp, Homo Sapiens; identical to SEQ ID NO: 2705

SEQ ID NO: 53667 - DNA, 35 bp, Homo Sapiens; identical to SEQ ID NO: 7816

SEQ ID NO: 53668 - DNA, 33 bp, Homo Sapiens; identical to SEQ ID NO: 24136

SEQ ID NO: 53669 - DNA, 35 bp, Homo Sapiens; identical to SEQ ID NO: 8582

SEQ ID NO: 53670 - DNA, 31 bp, Homo Sapiens; identical to SEQ ID NO: 5138

SEQ ID NO: 53671 - DNA, 37 bp, Homo Sapiens; identical to SEQ ID NO: 8107

SEQ ID NO: 53672 - DNA, 16 bp, Homo Sapiens
aatctcggtgggacct

SEQ ID NO: 53673 - DNA, 17 bp, Homo Sapiens
cgaaaccgggcggaaac

SEQ ID NO: 53674 - DNA, 36 bp, Homo Sapiens; identical to SEQ ID NO: 24723

SEQ ID NO: 53675 - DNA, 35 bp, Homo Sapiens; identical to SEQ ID NO: 16416

SEQ ID NO: 53676 - DNA, 18 bp, Homo Sapiens
aaaccgggcagaagcacc

SEQ ID NO: 53677 - DNA, 30 bp, Homo Sapiens; identical to SEQ ID NO: 5130

SEQ ID NO: 53678 - DNA, 20 bp, Homo Sapiens
cgatccccgtacgggccacc

SEQ ID NO: 53679 - DNA, 33 bp, Homo Sapiens; identical to SEQ ID NO: 1664

SEQ ID NO: 53680 - DNA, 18 bp, Homo Sapiens
gaaaccgggcagaagcac

SEQ ID NO: 53681 - DNA, 35 bp, Homo Sapiens; identical to SEQ ID NO: 24649

SEQ ID NO: 53682 - DNA, 36 bp, Homo Sapiens; identical to SEQ ID NO: 8583

SEQ ID NO: 53683 - DNA, 35 bp, Homo Sapiens; identical to SEQ ID NO: 30250

SEQ ID NO: 53684 - DNA, 35 bp, Homo Sapiens; identical to SEQ ID NO: 10938

SEQ ID NO: 53685 - DNA, 35 bp, Homo Sapiens; identical to SEQ ID NO: 24646

SEQ ID NO: 53686 - DNA, 44 bp, Homo Sapiens; identical to SEQ ID NO: 13630

SEQ ID NO: 53687 - DNA, 43 bp, Homo Sapiens; identical to SEQ ID NO: 9261

SEQ ID NO: 53688 - DNA, 32 bp, Homo Sapiens; identical to SEQ ID NO: 1378

SEQ ID NO: 53689 - DNA, 28 bp, Homo Sapiens
gcgtgggttcgaatcccatcctcgtcgc

SEQ ID NO: 53690 - DNA, 19 bp, Homo Sapiens
tcaaatctcggtgggacct

SEQ ID NO: 53691 - DNA, 40 bp, Homo Sapiens; identical to SEQ ID NO: 8340

SEQ ID NO: 53692 - DNA, 35 bp, Homo Sapiens; identical to SEQ ID NO: 3787

SEQ ID NO: 53693 - DNA, 36 bp, Homo Sapiens; identical to SEQ ID NO: 20597

SEQ ID NO: 53694 - DNA, 39 bp, Homo Sapiens; identical to SEQ ID NO: 36385

SEQ ID NO: 53695 - DNA, 37 bp, Homo Sapiens; identical to SEQ ID NO: 36634

SEQ ID NO: 53696 - DNA, 31 bp, Homo Sapiens; identical to SEQ ID NO: 20118

SEQ ID NO: 53697 - DNA, 35 bp, Homo Sapiens; identical to SEQ ID NO: 24722

SEQ ID NO: 53698 - DNA, 33 bp, Homo Sapiens; identical to SEQ ID NO: 37605

SEQ ID NO: 53699 - DNA, 34 bp, Homo Sapiens; identical to SEQ ID NO: 8589

SEQ ID NO: 53700 - DNA, 33 bp, Homo Sapiens; identical to SEQ ID NO: 1576

SEQ ID NO: 53701 - DNA, 37 bp, Homo Sapiens; identical to SEQ ID NO: 6703

SEQ ID NO: 53702 - DNA, 31 bp, Homo Sapiens; identical to SEQ ID NO: 8397

SEQ ID NO: 53703 - DNA, 18 bp, Homo Sapiens
atcccgggcggaaacacc

SEQ ID NO: 53704 - DNA, 43 bp, Homo Sapiens; identical to SEQ ID NO: 36499

SEQ ID NO: 53705 - DNA, 32 bp, Homo Sapiens; identical to SEQ ID NO: 1371

SEQ ID NO: 53706 - DNA, 30 bp, Homo Sapiens; identical to SEQ ID NO: 16772

SEQ ID NO: 53707 - DNA, 29 bp, Homo Sapiens
gtcgctggttcgaatccggctcgaaggac

SEQ ID NO: 53708 - DNA, 44 bp, Homo Sapiens; identical to SEQ ID NO: 10204

SEQ ID NO: 53709 - DNA, 35 bp, Homo Sapiens; identical to SEQ ID NO: 29703

SEQ ID NO: 53710 - DNA, 29 bp, Homo Sapiens
gatccgagttcaaatctcggtgggacctc

SEQ ID NO: 53711 - DNA, 34 bp, Homo Sapiens; identical to SEQ ID NO: 8006

SEQ ID NO: 53712 - DNA, 33 bp, Homo Sapiens; identical to SEQ ID NO: 29341

SEQ ID NO: 53713 - DNA, 35 bp, Homo Sapiens; identical to SEQ ID NO: 2161

SEQ ID NO: 53714 - DNA, 18 bp, Homo Sapiens
attcccgggcggcgcacc

SEQ ID NO: 53715 - DNA, 25 bp, Homo Sapiens
gtgttcaagtcacgtcggggtcacc

SEQ ID NO: 53716 - DNA, 31 bp, Homo Sapiens; identical to SEQ ID NO: 19388

SEQ ID NO: 53717 - DNA, 32 bp, Homo Sapiens; identical to SEQ ID NO: 5171

SEQ ID NO: 53718 - DNA, 17 bp, Homo Sapiens
atcccgggcggaaacac

SEQ ID NO: 53719 - DNA, 36 bp, Homo Sapiens; identical to SEQ ID NO: 42660

SEQ ID NO: 53720 - DNA, 25 bp, Homo Sapiens
cgggttcgattcccgggcggcgcac

SEQ ID NO: 53721 - DNA, 32 bp, Homo Sapiens; identical to SEQ ID NO: 1634

SEQ ID NO: 53722 - DNA, 42 bp, Homo Sapiens; identical to SEQ ID NO: 9260

SEQ ID NO: 53723 - DNA, 35 bp, Homo Sapiens; identical to SEQ ID NO: 26765

SEQ ID NO: 53724 - DNA, 34 bp, Homo Sapiens; identical to SEQ ID NO: 15557

SEQ ID NO: 53725 - DNA, 20 bp, Homo Sapiens
tcgatccccgtacgggccac

SEQ ID NO: 53726 - DNA, 27 bp, Homo Sapiens
aggcggcccgggttcgactcccggtgt

SEQ ID NO: 53727 - DNA, 41 bp, Homo Sapiens; identical to SEQ ID NO: 36336

SEQ ID NO: 53728 - DNA, 38 bp, Homo Sapiens; identical to SEQ ID NO: 37914

SEQ ID NO: 53729 - DNA, 43 bp, Homo Sapiens; identical to SEQ ID NO: 41033

SEQ ID NO: 53730 - DNA, 35 bp, Homo Sapiens; identical to SEQ ID NO: 33804

SEQ ID NO: 53731 - DNA, 41 bp, Homo Sapiens; identical to SEQ ID NO: 26819

SEQ ID NO: 53732 - DNA, 36 bp, Homo Sapiens; identical to SEQ ID NO: 918

SEQ ID NO: 53733 - DNA, 33 bp, Homo Sapiens; identical to SEQ ID NO: 444

SEQ ID NO: 53734 - DNA, 30 bp, Homo Sapiens; identical to SEQ ID NO: 3185

SEQ ID NO: 53735 - DNA, 30 bp, Homo Sapiens; identical to SEQ ID NO: 1632

SEQ ID NO: 53736 - DNA, 27 bp, Homo Sapiens
tatggtctagcggttaggattcctggt

SEQ ID NO: 53737 - DNA, 36 bp, Homo Sapiens; identical to SEQ ID NO: 26864

SEQ ID NO: 53738 - DNA, 34 bp, Homo Sapiens; identical to SEQ ID NO: 8551

SEQ ID NO: 53739 - DNA, 35 bp, Homo Sapiens; identical to SEQ ID NO: 11540

SEQ ID NO: 53740 - DNA, 37 bp, Homo Sapiens; identical to SEQ ID NO: 14763

SEQ ID NO: 53741 - DNA, 19 bp, Homo Sapiens
gaaaccgggcagaagcacc

SEQ ID NO: 53742 - DNA, 36 bp, Homo Sapiens; identical to SEQ ID NO: 24532

SEQ ID NO: 53743 - DNA, 37 bp, Homo Sapiens; identical to SEQ ID NO: 12157

SEQ ID NO: 53744 - DNA, 25 bp, Homo Sapiens
cgtgttcgaatcacgtcggggtcac

SEQ ID NO: 53745 - DNA, 24 bp, Homo Sapiens
tggttcgatcccgggtttcggcac

SEQ ID NO: 53746 - DNA, 35 bp, Homo Sapiens; identical to SEQ ID NO: 26797

SEQ ID NO: 53747 - DNA, 32 bp, Homo Sapiens; identical to SEQ ID NO: 1663

SEQ ID NO: 53748 - DNA, 34 bp, Homo Sapiens; identical to SEQ ID NO: 6891

SEQ ID NO: 53749 - DNA, 36 bp, Homo Sapiens; identical to SEQ ID NO: 16007

SEQ ID NO: 53750 - DNA, 30 bp, Homo Sapiens; identical to SEQ ID NO: 11877

SEQ ID NO: 53751 - DNA, 32 bp, Homo Sapiens; identical to SEQ ID NO: 15533

SEQ ID NO: 53752 - DNA, 44 bp, Homo Sapiens; identical to SEQ ID NO: 41748

SEQ ID NO: 53753 - DNA, 41 bp, Homo Sapiens; identical to SEQ ID NO: 26727

SEQ ID NO: 53754 - DNA, 30 bp, Homo Sapiens; identical to SEQ ID NO: 7470

SEQ ID NO: 53755 - DNA, 18 bp, Homo Sapiens
agtggcgcagcggaagcg

SEQ ID NO: 53756 - DNA, 34 bp, Homo Sapiens; identical to SEQ ID NO: 7815

SEQ ID NO: 53757 - DNA, 35 bp, Homo Sapiens; identical to SEQ ID NO: 24531

SEQ ID NO: 53758 - DNA, 32 bp, Homo Sapiens; identical to SEQ ID NO: 5167

SEQ ID NO: 53759 - DNA, 31 bp, Homo Sapiens; identical to SEQ ID NO: 27207

SEQ ID NO: 53760 - DNA, 38 bp, Homo Sapiens; identical to SEQ ID NO: 27496

SEQ ID NO: 53761 - DNA, 34 bp, Homo Sapiens; identical to SEQ ID NO: 11965

SEQ ID NO: 53762 - DNA, 29 bp, Homo Sapiens
ttgagggttcgaatcccttcgtggttgcc

SEQ ID NO: 53763 - DNA, 33 bp, Homo Sapiens; identical to SEQ ID NO: 10094

SEQ ID NO: 53764 - DNA, 35 bp, Homo Sapiens; identical to SEQ ID NO: 14222

SEQ ID NO: 53765 - DNA, 46 bp, Homo Sapiens; identical to SEQ ID NO: 14304

SEQ ID NO: 53766 - DNA, 33 bp, Homo Sapiens; identical to SEQ ID NO: 5217

SEQ ID NO: 53767 - DNA, 19 bp, Homo Sapiens
agcatgggactcttcatcc

SEQ ID NO: 53768 - DNA, 36 bp, Homo Sapiens; identical to SEQ ID NO: 6716

SEQ ID NO: 53769 - DNA, 37 bp, Homo Sapiens; identical to SEQ ID NO: 22466

SEQ ID NO: 53770 - DNA, 45 bp, Homo Sapiens; identical to SEQ ID NO: 3509

SEQ ID NO: 53771 - DNA, 37 bp, Homo Sapiens; identical to SEQ ID NO: 30923

SEQ ID NO: 53772 - DNA, 45 bp, Homo Sapiens; identical to SEQ ID NO: 42950

SEQ ID NO: 53773 - DNA, 40 bp, Homo Sapiens; identical to SEQ ID NO: 36335

SEQ ID NO: 53774 - DNA, 25 bp, Homo Sapiens
acgggttcgaaccccgtccgtgcct

SEQ ID NO: 53775 - DNA, 27 bp, Homo Sapiens
tccgggttcgagtcccggcggagtcgc

SEQ ID NO: 53776 - DNA, 36 bp, Homo Sapiens; identical to SEQ ID NO: 10916

SEQ ID NO: 53777 - DNA, 32 bp, Homo Sapiens; identical to SEQ ID NO: 5157

SEQ ID NO: 53778 - DNA, 31 bp, Homo Sapiens; identical to SEQ ID NO: 3852

SEQ ID NO: 53779 - DNA, 26 bp, Homo Sapiens
gcggaagcgtgctgggcccataaccc

SEQ ID NO: 53780 - DNA, 38 bp, Homo Sapiens; identical to SEQ ID NO: 26993

SEQ ID NO: 53781 - DNA, 19 bp, Homo Sapiens
gatccccgtacgggccacc

SEQ ID NO: 53782 - DNA, 36 bp, Homo Sapiens; identical to SEQ ID NO: 39165

SEQ ID NO: 53783 - DNA, 22 bp, Homo Sapiens
atctaaaccatcctctgctacc

SEQ ID NO: 53784 - DNA, 43 bp, Homo Sapiens; identical to SEQ ID NO: 30025

SEQ ID NO: 53785 - DNA, 30 bp, Homo Sapiens; identical to SEQ ID NO: 7490

SEQ ID NO: 53786 - DNA, 35 bp, Homo Sapiens; identical to SEQ ID NO: 20587

SEQ ID NO: 53787 - DNA, 34 bp, Homo Sapiens; identical to SEQ ID NO: 8012

SEQ ID NO: 53788 - DNA, 43 bp, Homo Sapiens; identical to SEQ ID NO: 42929

SEQ ID NO: 53789 - DNA, 29 bp, Homo Sapiens
ggtccccggttcgaaaccgggcggaaaca

SEQ ID NO: 53790 - DNA, 36 bp, Homo Sapiens; identical to SEQ ID NO: 6723

SEQ ID NO: 53791 - DNA, 33 bp, Homo Sapiens; identical to SEQ ID NO: 3961

SEQ ID NO: 53792 - DNA, 34 bp, Homo Sapiens; identical to SEQ ID NO: 9059

SEQ ID NO: 53793 - DNA, 34 bp, Homo Sapiens; identical to SEQ ID NO: 14594

SEQ ID NO: 53794 - DNA, 31 bp, Homo Sapiens; identical to SEQ ID NO: 27918

SEQ ID NO: 53795 - DNA, 37 bp, Homo Sapiens; identical to SEQ ID NO: 919

SEQ ID NO: 53796 - DNA, 44 bp, Homo Sapiens; identical to SEQ ID NO: 14776

SEQ ID NO: 53797 - DNA, 21 bp, Homo Sapiens
ttcaatcccgggtttcggcac

SEQ ID NO: 53798 - DNA, 32 bp, Homo Sapiens; identical to SEQ ID NO: 24135

SEQ ID NO: 53799 - DNA, 36 bp, Homo Sapiens; identical to SEQ ID NO: 24720

SEQ ID NO: 53800 - DNA, 34 bp, Homo Sapiens; identical to SEQ ID NO: 8833

SEQ ID NO: 53801 - DNA, 29 bp, Homo Sapiens
atcctgggttcgaatcccagcggggcctc

SEQ ID NO: 53802 - DNA, 29 bp, Homo Sapiens
attgcaggttcgagtcctgccgcggtcgc

SEQ ID NO: 53803 - DNA, 33 bp, Homo Sapiens; identical to SEQ ID NO: 36994

SEQ ID NO: 53804 - DNA, 44 bp, Homo Sapiens; identical to SEQ ID NO: 36577

SEQ ID NO: 53805 - DNA, 24 bp, Homo Sapiens
ggttcaaatcccggacgagccccc

SEQ ID NO: 53806 - DNA, 41 bp, Homo Sapiens; identical to SEQ ID NO: 28610

SEQ ID NO: 53807 - DNA, 45 bp, Homo Sapiens; identical to SEQ ID NO: 7361

SEQ ID NO: 53808 - DNA, 23 bp, Homo Sapiens
gtatgattctcggtttgggtccg

SEQ ID NO: 53809 - DNA, 41 bp, Homo Sapiens; identical to SEQ ID NO: 8767

SEQ ID NO: 53810 - DNA, 40 bp, Homo Sapiens; identical to SEQ ID NO: 41654

SEQ ID NO: 53811 - DNA, 47 bp, Homo Sapiens; identical to SEQ ID NO: 14567

SEQ ID NO: 53812 - DNA, 35 bp, Homo Sapiens; identical to SEQ ID NO: 9089

SEQ ID NO: 53813 - DNA, 43 bp, Homo Sapiens; identical to SEQ ID NO: 25543

SEQ ID NO: 53814 - DNA, 38 bp, Homo Sapiens; identical to SEQ ID NO: 6336

SEQ ID NO: 53815 - DNA, 45 bp, Homo Sapiens; identical to SEQ ID NO: 35291

SEQ ID NO: 53816 - DNA, 36 bp, Homo Sapiens; identical to SEQ ID NO: 42926

SEQ ID NO: 53817 - DNA, 42 bp, Homo Sapiens; identical to SEQ ID NO: 43037

SEQ ID NO: 53818 - DNA, 36 bp, Homo Sapiens; identical to SEQ ID NO: 42915

SEQ ID NO: 53819 - DNA, 34 bp, Homo Sapiens; identical to SEQ ID NO: 35054

SEQ ID NO: 53820 - DNA, 18 bp, Homo Sapiens
cgaatctcggtgggacct

SEQ ID NO: 53821 - DNA, 21 bp, Homo Sapiens
aggtcgatggatcgaaaccat

SEQ ID NO: 53822 - DNA, 34 bp, Homo Sapiens; identical to SEQ ID NO: 24642

SEQ ID NO: 53823 - DNA, 43 bp, Homo Sapiens; identical to SEQ ID NO: 36291

SEQ ID NO: 53824 - DNA, 36 bp, Homo Sapiens; identical to SEQ ID NO: 36662

SEQ ID NO: 53825 - DNA, 29 bp, Homo Sapiens
aaaatgttggttatacccttcccgtacta

SEQ ID NO: 53826 - DNA, 32 bp, Homo Sapiens; identical to SEQ ID NO: 32760

SEQ ID NO: 53827 - DNA, 25 bp, Homo Sapiens
attcggcgctctcaccgccgcggcc

SEQ ID NO: 53828 - DNA, 31 bp, Homo Sapiens; identical to SEQ ID NO: 5228

SEQ ID NO: 53829 - DNA, 40 bp, Homo Sapiens; identical to SEQ ID NO: 10297

SEQ ID NO: 53830 - DNA, 31 bp, Homo Sapiens; identical to SEQ ID NO: 1353

SEQ ID NO: 53831 - DNA, 33 bp, Homo Sapiens; identical to SEQ ID NO: 1355

SEQ ID NO: 53832 - DNA, 35 bp, Homo Sapiens; identical to SEQ ID NO: 24537

SEQ ID NO: 53833 - DNA, 34 bp, Homo Sapiens; identical to SEQ ID NO: 27101

SEQ ID NO: 53834 - DNA, 18 bp, Homo Sapiens
aggtcgtgagttcgagcc

SEQ ID NO: 53835 - DNA, 40 bp, Homo Sapiens; identical to SEQ ID NO: 20625

SEQ ID NO: 53836 - DNA, 44 bp, Homo Sapiens; identical to SEQ ID NO: 22583

SEQ ID NO: 53837 - DNA, 37 bp, Homo Sapiens; identical to SEQ ID NO: 6335

SEQ ID NO: 53838 - DNA, 46 bp, Homo Sapiens; identical to SEQ ID NO: 29176

SEQ ID NO: 53839 - DNA, 31 bp, Homo Sapiens; identical to SEQ ID NO: 19409

SEQ ID NO: 53840 - DNA, 42 bp, Homo Sapiens; identical to SEQ ID NO: 7620

SEQ ID NO: 53841 - DNA, 20 bp, Homo Sapiens
ctaaaccatcctctgctacc

SEQ ID NO: 53842 - DNA, 34 bp, Homo Sapiens; identical to SEQ ID NO: 8555

SEQ ID NO: 53843 - DNA, 29 bp, Homo Sapiens
gggattgtgggttcgagtcccacccgggg

SEQ ID NO: 53844 - DNA, 35 bp, Homo Sapiens; identical to SEQ ID NO: 20596

SEQ ID NO: 53845 - DNA, 44 bp, Homo Sapiens; identical to SEQ ID NO: 36500

SEQ ID NO: 53846 - DNA, 40 bp, Homo Sapiens; identical to SEQ ID NO: 26752

SEQ ID NO: 53847 - DNA, 28 bp, Homo Sapiens
tcctgggttcgaatcccagcggggcctc

SEQ ID NO: 53848 - DNA, 29 bp, Homo Sapiens
atcctgggttcgaatcccagcggtgcctc

SEQ ID NO: 53849 - DNA, 18 bp, Homo Sapiens
gatcccgggcggaaacac

SEQ ID NO: 53850 - DNA, 39 bp, Homo Sapiens; identical to SEQ ID NO: 28285

SEQ ID NO: 53851 - DNA, 35 bp, Homo Sapiens; identical to SEQ ID NO: 5027

SEQ ID NO: 53852 - DNA, 23 bp, Homo Sapiens
cataatctgaaggtcctgagttc

SEQ ID NO: 53853 - DNA, 44 bp, Homo Sapiens; identical to SEQ ID NO: 36502

SEQ ID NO: 53854 - DNA, 42 bp, Homo Sapiens; identical to SEQ ID NO: 41507

SEQ ID NO: 53855 - DNA, 44 bp, Homo Sapiens; identical to SEQ ID NO: 29744

SEQ ID NO: 53856 - DNA, 17 bp, Homo Sapiens
gcggcccgggttcgact

SEQ ID NO: 53857 - DNA, 34 bp, Homo Sapiens; identical to SEQ ID NO: 40728

SEQ ID NO: 53858 - DNA, 34 bp, Homo Sapiens; identical to SEQ ID NO: 24530

SEQ ID NO: 53859 - DNA, 17 bp, Homo Sapiens
attctcggtttgggtcc

SEQ ID NO: 53860 - DNA, 23 bp, Homo Sapiens
gttcgaatccctccgtggttacc

SEQ ID NO: 53861 - DNA, 46 bp, Homo Sapiens; identical to SEQ ID NO: 42954

SEQ ID NO: 53862 - DNA, 39 bp, Homo Sapiens; identical to SEQ ID NO: 33918

SEQ ID NO: 53863 - DNA, 30 bp, Homo Sapiens; identical to SEQ ID NO: 18559

SEQ ID NO: 53864 - DNA, 39 bp, Homo Sapiens; identical to SEQ ID NO: 15929

SEQ ID NO: 53865 - DNA, 18 bp, Homo Sapiens
aattctcgctggggcctc

SEQ ID NO: 53866 - DNA, 22 bp, Homo Sapiens
ttcgaatcccagtagagcctcc

SEQ ID NO: 53867 - DNA, 17 bp, Homo Sapiens
attcggcgctctcaccg

SEQ ID NO: 53868 - DNA, 47 bp, Homo Sapiens; identical to SEQ ID NO: 8720

SEQ ID NO: 53869 - DNA, 34 bp, Homo Sapiens; identical to SEQ ID NO: 17216

SEQ ID NO: 53870 - DNA, 32 bp, Homo Sapiens; identical to SEQ ID NO: 17062

SEQ ID NO: 53871 - DNA, 36 bp, Homo Sapiens; identical to SEQ ID NO: 6702

SEQ ID NO: 53872 - DNA, 32 bp, Homo Sapiens; identical to SEQ ID NO: 5174

SEQ ID NO: 53873 - DNA, 33 bp, Homo Sapiens; identical to SEQ ID NO: 38314

SEQ ID NO: 53874 - DNA, 25 bp, Homo Sapiens
cgggttcaatccccggcatctccac

SEQ ID NO: 53875 - DNA, 17 bp, Homo Sapiens
gtggcgcagcggaagcg

SEQ ID NO: 53876 - DNA, 19 bp, Homo Sapiens
cgaatcccttcgtggttgc

SEQ ID NO: 53877 - DNA, 35 bp, Homo Sapiens; identical to SEQ ID NO: 37088

SEQ ID NO: 53878 - DNA, 20 bp, Homo Sapiens
caagtccctgtccaggcgcc

SEQ ID NO: 53879 - DNA, 40 bp, Homo Sapiens; identical to SEQ ID NO: 19702

SEQ ID NO: 53880 - DNA, 27 bp, Homo Sapiens
gagatgaaaacctttttccaaggacac

SEQ ID NO: 53881 - DNA, 33 bp, Homo Sapiens; identical to SEQ ID NO: 8581

SEQ ID NO: 53882 - DNA, 16 bp, Homo Sapiens
gatccttaggtcgctg

SEQ ID NO: 53883 - DNA, 34 bp, Homo Sapiens; identical to SEQ ID NO: 40650

SEQ ID NO: 53884 - DNA, 24 bp, Homo Sapiens
tggggattgtgggttcgagtccca

SEQ ID NO: 53885 - DNA, 16 bp, Homo Sapiens
tctaaggcgctgcgtt

SEQ ID NO: 53886 - DNA, 33 bp, Homo Sapiens; identical to SEQ ID NO: 15179

SEQ ID NO: 53887 - DNA, 34 bp, Homo Sapiens; identical to SEQ ID NO: 36723

SEQ ID NO: 53888 - DNA, 34 bp, Homo Sapiens; identical to SEQ ID NO: 8933

SEQ ID NO: 53889 - DNA, 36 bp, Homo Sapiens; identical to SEQ ID NO: 42451

SEQ ID NO: 53890 - DNA, 34 bp, Homo Sapiens; identical to SEQ ID NO: 20146

SEQ ID NO: 53891 - DNA, 41 bp, Homo Sapiens; identical to SEQ ID NO: 35134

SEQ ID NO: 53892 - DNA, 38 bp, Homo Sapiens; identical to SEQ ID NO: 35078

SEQ ID NO: 53893 - DNA, 33 bp, Homo Sapiens; identical to SEQ ID NO: 10190

SEQ ID NO: 53894 - DNA, 34 bp, Homo Sapiens; identical to SEQ ID NO: 35413

SEQ ID NO: 53895 - DNA, 35 bp, Homo Sapiens; identical to SEQ ID NO: 24719

SEQ ID NO: 53896 - DNA, 24 bp, Homo Sapiens
gggttcaagtccctgtccaggcgc

SEQ ID NO: 53897 - DNA, 33 bp, Homo Sapiens; identical to SEQ ID NO: 5168

SEQ ID NO: 53898 - DNA, 22 bp, Homo Sapiens
cggttcgaaaccgggcggaaac

SEQ ID NO: 53899 - DNA, 21 bp, Homo Sapiens
gttcgagcctcagagagggca

SEQ ID NO: 53900 - DNA, 34 bp, Homo Sapiens; identical to SEQ ID NO: 14221

SEQ ID NO: 53901 - DNA, 35 bp, Homo Sapiens; identical to SEQ ID NO: 16532

SEQ ID NO: 53902 - DNA, 34 bp, Homo Sapiens; identical to SEQ ID NO: 40691

SEQ ID NO: 53903 - DNA, 39 bp, Homo Sapiens; identical to SEQ ID NO: 2259

SEQ ID NO: 53904 - DNA, 31 bp, Homo Sapiens; identical to SEQ ID NO: 13229

SEQ ID NO: 53905 - DNA, 35 bp, Homo Sapiens; identical to SEQ ID NO: 2800

SEQ ID NO: 53906 - DNA, 34 bp, Homo Sapiens; identical to SEQ ID NO: 8544

SEQ ID NO: 53907 - DNA, 33 bp, Homo Sapiens; identical to SEQ ID NO: 24938

SEQ ID NO: 53908 - DNA, 36 bp, Homo Sapiens; identical to SEQ ID NO: 9937

SEQ ID NO: 53909 - DNA, 36 bp, Homo Sapiens; identical to SEQ ID NO: 14075

SEQ ID NO: 53910 - DNA, 18 bp, Homo Sapiens
cttaagatccaatggatt

SEQ ID NO: 53911 - DNA, 33 bp, Homo Sapiens; identical to SEQ ID NO: 3746

SEQ ID NO: 53912 - DNA, 36 bp, Homo Sapiens; identical to SEQ ID NO: 28541

SEQ ID NO: 53913 - DNA, 33 bp, Homo Sapiens; identical to SEQ ID NO: 24951

SEQ ID NO: 53914 - DNA, 21 bp, Homo Sapiens
gcgttcgattcccggtcaggg

SEQ ID NO: 53915 - DNA, 33 bp, Homo Sapiens; identical to SEQ ID NO: 8573

SEQ ID NO: 53916 - DNA, 30 bp, Homo Sapiens; identical to SEQ ID NO: 34870

SEQ ID NO: 53917 - DNA, 33 bp, Homo Sapiens; identical to SEQ ID NO: 39346

SEQ ID NO: 53918 - DNA, 35 bp, Homo Sapiens; identical to SEQ ID NO: 40729

SEQ ID NO: 53919 - DNA, 29 bp, Homo Sapiens
tcagaagattgagggttcgaatcccttcg

SEQ ID NO: 53920 - DNA, 34 bp, Homo Sapiens; identical to SEQ ID NO: 35653

SEQ ID NO: 53921 - DNA, 36 bp, Homo Sapiens; identical to SEQ ID NO: 26872

SEQ ID NO: 53922 - DNA, 17 bp, Homo Sapiens
aattccccgacggggag

SEQ ID NO: 53923 - DNA, 35 bp, Homo Sapiens; identical to SEQ ID NO: 25745

SEQ ID NO: 53924 - DNA, 36 bp, Homo Sapiens; identical to SEQ ID NO: 26869

SEQ ID NO: 53925 - DNA, 21 bp, Homo Sapiens
tctggtctccggatggaggcg

SEQ ID NO: 53926 - DNA, 31 bp, Homo Sapiens; identical to SEQ ID NO: 22605

SEQ ID NO: 53927 - DNA, 34 bp, Homo Sapiens; identical to SEQ ID NO: 37247

SEQ ID NO: 53928 - DNA, 37 bp, Homo Sapiens; identical to SEQ ID NO: 7569

SEQ ID NO: 53929 - DNA, 36 bp, Homo Sapiens; identical to SEQ ID NO: 6259

SEQ ID NO: 53930 - DNA, 34 bp, Homo Sapiens; identical to SEQ ID NO: 33907

SEQ ID NO: 53931 - DNA, 31 bp, Homo Sapiens; identical to SEQ ID NO: 34894

SEQ ID NO: 53932 - DNA, 24 bp, Homo Sapiens
ggctgttaaccgaaaggttggtgg

SEQ ID NO: 53933 - DNA, 17 bp, Homo Sapiens
aatccgagtcacggcac

SEQ ID NO: 53934 - DNA, 16 bp, Homo Sapiens
aaaccgggcggaaaca

SEQ ID NO: 53935 - DNA, 17 bp, Homo Sapiens
aaaccgggcagaagcac

SEQ ID NO: 53936 - DNA, 18 bp, Homo Sapiens
atccccgtacgggccacc

SEQ ID NO: 53937 - DNA, 16 bp, Homo Sapiens
tcccggccactgcacc

SEQ ID NO: 53938 - DNA, 20 bp, Homo Sapiens
tcgaatcctgttcgtgacgc

SEQ ID NO: 53939 - DNA, 19 bp, Homo Sapiens
cgaatcctgttcgtgacgc

SEQ ID NO: 53940 - DNA, 16 bp, Homo Sapiens
atccccgtacgggcca

SEQ ID NO: 53941 - DNA, 16 bp, Homo Sapiens
aatccgagtcacggca

SEQ ID NO: 53942 - DNA, 16 bp, Homo Sapiens
aaaccgggcagaagca

SEQ ID NO: 53943 - DNA, 16 bp, Homo Sapiens
tagagcatttgactgc

SEQ ID NO: 53944 - DNA, 47 bp, Homo Sapiens; identical to SEQ ID NO: 24606

SEQ ID NO: 53945 - DNA, 16 bp, Homo Sapiens
tcaggatggccgagtg

SEQ ID NO: 53946 - DNA, 34 bp, Homo Sapiens; identical to SEQ ID NO: 20393

SEQ ID NO: 53947 - DNA, 38 bp, Homo Sapiens; identical to SEQ ID NO: 9926

SEQ ID NO: 53948 - DNA, 17 bp, Homo Sapiens
catgggactcttcatcc

SEQ ID NO: 53949 - DNA, 25 bp, Homo Sapiens
ggctgtgatggccgagtggttaagg

SEQ ID NO: 53950 - DNA, 18 bp, Homo Sapiens
gaatccgagtcacggcac

SEQ ID NO: 53951 - DNA, 36 bp, Homo Sapiens; identical to SEQ ID NO: 17065

SEQ ID NO: 53952 - DNA, 24 bp, Homo Sapiens
cggttcgaatccgagtcacggcac

SEQ ID NO: 53953 - DNA, 35 bp, Homo Sapiens; identical to SEQ ID NO: 24715

SEQ ID NO: 53954 - DNA, 19 bp, Homo Sapiens
gaaaccgggcggaaacacc

SEQ ID NO: 53955 - DNA, 31 bp, Homo Sapiens; identical to SEQ ID NO: 16192

SEQ ID NO: 53956 - DNA, 37 bp, Homo Sapiens; identical to SEQ ID NO: 6724

SEQ ID NO: 53957 - DNA, 31 bp, Homo Sapiens; identical to SEQ ID NO: 12457

SEQ ID NO: 53958 - DNA, 23 bp, Homo Sapiens
cggttcgaatccgagtcacggca

SEQ ID NO: 53959 - DNA, 20 bp, Homo Sapiens
caaatccgggtgccccctcc

SEQ ID NO: 53960 - DNA, 35 bp, Homo Sapiens; identical to SEQ ID NO: 8950

SEQ ID NO: 53961 - DNA, 25 bp, Homo Sapiens
tggttcgaatccggctcgaaggacc

SEQ ID NO: 53962 - DNA, 35 bp, Homo Sapiens; identical to SEQ ID NO: 24643

SEQ ID NO: 53963 - DNA, 35 bp, Homo Sapiens; identical to SEQ ID NO: 2917

SEQ ID NO: 53964 - DNA, 19 bp, Homo Sapiens
cgaatcccagcggggcctc

SEQ ID NO: 53965 - DNA, 36 bp, Homo Sapiens; identical to SEQ ID NO: 29431

SEQ ID NO: 53966 - DNA, 41 bp, Homo Sapiens; identical to SEQ ID NO: 2514

SEQ ID NO: 53967 - DNA, 21 bp, Homo Sapiens
tcgaaaccgggcagaagcacc

SEQ ID NO: 53968 - DNA, 24 bp, Homo Sapiens
atggatcgaaaccatcctctgcta

SEQ ID NO: 53969 - DNA, 33 bp, Homo Sapiens; identical to SEQ ID NO: 11630

SEQ ID NO: 53970 - DNA, 24 bp, Homo Sapiens
agttcaaatctcgctggggcctcc

SEQ ID NO: 53971 - DNA, 21 bp, Homo Sapiens
tcgagtcccatctgggtcgcc

SEQ ID NO: 53972 - DNA, 34 bp, Homo Sapiens; identical to SEQ ID NO: 18568

SEQ ID NO: 53973 - DNA, 29 bp, Homo Sapiens
aacctcggttcgaatccgagtcacggcac

SEQ ID NO: 53974 - DNA, 22 bp, Homo Sapiens
ttcgatccccgtacgggccacc

SEQ ID NO: 53975 - DNA, 26 bp, Homo Sapiens
aggcggcccgggttcgactcccggtg

SEQ ID NO: 53976 - DNA, 29 bp, Homo Sapiens
gttccgggttcgagtcccggcggagtcgc

SEQ ID NO: 53977 - DNA, 22 bp, Homo Sapiens
gttcaatcccgggtttcggcac

SEQ ID NO: 53978 - DNA, 18 bp, Homo Sapiens
aaatccgggtgccccctc

SEQ ID NO: 53979 - DNA, 28 bp, Homo Sapiens
acctcggttcgaatccgagtcacggcac

SEQ ID NO: 53980 - DNA, 22 bp, Homo Sapiens
gttcgattcccggtcatggaac

SEQ ID NO: 53981 - DNA, 21 bp, Homo Sapiens
ttcgaatcccagcggggcctc

SEQ ID NO: 53982 - DNA, 24 bp, Homo Sapiens
aggttcgagtcctgccgcggtcgc

SEQ ID NO: 53983 - DNA, 20 bp, Homo Sapiens
tcgaatcccagcggggcctc

SEQ ID NO: 53984 - DNA, 18 bp, Homo Sapiens
gggttcgactcccggtgt

SEQ ID NO: 53985 - DNA, 21 bp, Homo Sapiens
tcaattccccgacggggagcc

SEQ ID NO: 53986 - DNA, 41 bp, Homo Sapiens; identical to SEQ ID NO: 28601

SEQ ID NO: 53987 - DNA, 22 bp, Homo Sapiens
gttcgatcctcacctggagcac

SEQ ID NO: 53988 - DNA, 41 bp, Homo Sapiens; identical to SEQ ID NO: 5913

SEQ ID NO: 53989 - DNA, 33 bp, Homo Sapiens; identical to SEQ ID NO: 8948

SEQ ID NO: 53990 - DNA, 17 bp, Homo Sapiens
aggagatcctgggttcg

SEQ ID NO: 53991 - DNA, 39 bp, Homo Sapiens; identical to SEQ ID NO: 19701

SEQ ID NO: 53992 - DNA, 24 bp, Homo Sapiens
ggttcgaatcccagcggggcctcc

SEQ ID NO: 53993 - DNA, 37 bp, Homo Sapiens; identical to SEQ ID NO: 7459

SEQ ID NO: 53994 - DNA, 22 bp, Homo Sapiens
cggaagcgtgctgggcccataa

SEQ ID NO: 53995 - DNA, 20 bp, Homo Sapiens
gttcgagcctcacacggggc

SEQ ID NO: 53996 - DNA, 32 bp, Homo Sapiens; identical to SEQ ID NO: 29841

SEQ ID NO: 53997 - DNA, 41 bp, Homo Sapiens; identical to SEQ ID NO: 3454

SEQ ID NO: 53998 - DNA, 31 bp, Homo Sapiens; identical to SEQ ID NO: 17646

SEQ ID NO: 53999 - DNA, 46 bp, Homo Sapiens; identical to SEQ ID NO: 24605

SEQ ID NO: 54000 - DNA, 21 bp, Homo Sapiens
gtcggtagagcatgagactct

SEQ ID NO: 54001 - DNA, 44 bp, Homo Sapiens; identical to SEQ ID NO: 30152

SEQ ID NO: 54002 - DNA, 36 bp, Homo Sapiens; identical to SEQ ID NO: 24716

SEQ ID NO: 54003 - DNA, 35 bp, Homo Sapiens; identical to SEQ ID NO: 17217

SEQ ID NO: 54004 - DNA, 24 bp, Homo Sapiens
tgttcaaatcacgtcggggtcacc

SEQ ID NO: 54005 - DNA, 30 bp, Homo Sapiens; identical to SEQ ID NO: 2992

SEQ ID NO: 54006 - DNA, 23 bp, Homo Sapiens
gttcgaaccccactcctggtacc

SEQ ID NO: 54007 - DNA, 46 bp, Homo Sapiens; identical to SEQ ID NO: 25461

SEQ ID NO: 54008 - DNA, 30 bp, Homo Sapiens; identical to SEQ ID NO: 5165

SEQ ID NO: 54009 - DNA, 19 bp, Homo Sapiens
gagccccagtggaaccacc

SEQ ID NO: 54010 - DNA, 24 bp, Homo Sapiens
agttcgaacctcagagggggcacc

SEQ ID NO: 54011 - DNA, 44 bp, Homo Sapiens; identical to SEQ ID NO: 16226

SEQ ID NO: 54012 - DNA, 32 bp, Homo Sapiens; identical to SEQ ID NO: 17006

SEQ ID NO: 54013 - DNA, 24 bp, Homo Sapiens
ggttcgagtcccatctggggtgcc

SEQ ID NO: 54014 - DNA, 19 bp, Homo Sapiens
aaatctcggtgggacctcc

SEQ ID NO: 54015 - DNA, 29 bp, Homo Sapiens
aggtcctgagttcgaacctcagagggggc

SEQ ID NO: 54016 - DNA, 28 bp, Homo Sapiens
ttcggcgctctcaccgccgcggcccggg

SEQ ID NO: 54017 - DNA, 21 bp, Homo Sapiens
ttcgattcccgggcggcgcac

SEQ ID NO: 54018 - DNA, 24 bp, Homo Sapiens
ggttcgagtcccatctgggtcgcc

SEQ ID NO: 54019 - DNA, 24 bp, Homo Sapiens
gggttcgaatcccttcgtggttgc

SEQ ID NO: 54020 - DNA, 18 bp, Homo Sapiens
gtatgattctcgctttgg

SEQ ID NO: 54021 - DNA, 16 bp, Homo Sapiens
tgaaggtcgtgagttc

SEQ ID NO: 54022 - DNA, 17 bp, Homo Sapiens
cgcattggacttctaat

SEQ ID NO: 54023 - DNA, 31 bp, Homo Sapiens; identical to SEQ ID NO: 18467

SEQ ID NO: 54024 - DNA, 31 bp, Homo Sapiens; identical to SEQ ID NO: 33842

SEQ ID NO: 54025 - DNA, 17 bp, Homo Sapiens
agggatgggttcgattc

SEQ ID NO: 54026 - DNA, 16 bp, Homo Sapiens
gttaggattcctggtt

SEQ ID NO: 54027 - DNA, 38 bp, Homo Sapiens; identical to SEQ ID NO: 16291

SEQ ID NO: 54028 - DNA, 18 bp, Homo Sapiens
gaatcccacttctgacac

SEQ ID NO: 54029 - DNA, 38 bp, Homo Sapiens; identical to SEQ ID NO: 29061

SEQ ID NO: 54030 - DNA, 19 bp, Homo Sapiens
cgaatccgagtcacggcac

SEQ ID NO: 54031 - DNA, 30 bp, Homo Sapiens; identical to SEQ ID NO: 12456

SEQ ID NO: 54032 - DNA, 18 bp, Homo Sapiens
gattcccggtcagggaac

SEQ ID NO: 54033 - DNA, 37 bp, Homo Sapiens; identical to SEQ ID NO: 29434

SEQ ID NO: 54034 - DNA, 31 bp, Homo Sapiens; identical to SEQ ID NO: 3862

SEQ ID NO: 54035 - DNA, 23 bp, Homo Sapiens
ggttcgatcccgggtttcggcac

SEQ ID NO: 54036 - DNA, 30 bp, Homo Sapiens; identical to SEQ ID NO: 7417

SEQ ID NO: 54037 - DNA, 20 bp, Homo Sapiens
cgagcctcacctggagcacc

SEQ ID NO: 54038 - DNA, 23 bp, Homo Sapiens
ggttcgaatcccttcgtggttgc

SEQ ID NO: 54039 - DNA, 33 bp, Homo Sapiens; identical to SEQ ID NO: 17002

SEQ ID NO: 54040 - DNA, 23 bp, Homo Sapiens
gttcaaatctcgctggggcctcc

SEQ ID NO: 54041 - DNA, 23 bp, Homo Sapiens
gttcgaacctcagagggggcacc

SEQ ID NO: 54042 - DNA, 35 bp, Homo Sapiens; identical to SEQ ID NO: 11966

SEQ ID NO: 54043 - DNA, 31 bp, Homo Sapiens; identical to SEQ ID NO: 7478

SEQ ID NO: 54044 - DNA, 34 bp, Homo Sapiens; identical to SEQ ID NO: 18702

SEQ ID NO: 54045 - DNA, 28 bp, Homo Sapiens
tatggtctagcggttaggattcctggtt

SEQ ID NO: 54046 - DNA, 30 bp, Homo Sapiens; identical to SEQ ID NO: 20825

SEQ ID NO: 54047 - DNA, 20 bp, Homo Sapiens
cgaatcccagcggggcctcc

SEQ ID NO: 54048 - DNA, 24 bp, Homo Sapiens
ggttcgagcccacccagggacgcc

SEQ ID NO: 54049 - DNA, 16 bp, Homo Sapiens
ggtgcgagaggtcccg

SEQ ID NO: 54050 - DNA, 20 bp, Homo Sapiens
attccggatcagaagattga

SEQ ID NO: 54051 - DNA, 43 bp, Homo Sapiens; identical to SEQ ID NO: 17864

SEQ ID NO: 54052 - DNA, 25 bp, Homo Sapiens
gggttcgaatcccttcgtggttgcc

SEQ ID NO: 54053 - DNA, 26 bp, Homo Sapiens
ggagaccggggttcgattccccgacg

SEQ ID NO: 54054 - DNA, 19 bp, Homo Sapiens
agtggttatcacgtctgct

SEQ ID NO: 54055 - DNA, 26 bp, Homo Sapiens
agccgtgatcgtatagtggttagtac

SEQ ID NO: 54056 - DNA, 31 bp, Homo Sapiens; identical to SEQ ID NO: 26040

SEQ ID NO: 54057 - DNA, 29 bp, Homo Sapiens
gaagaagcagcttcaaacctgccggggct

SEQ ID NO: 54058 - DNA, 34 bp, Homo Sapiens; identical to SEQ ID NO: 2354

SEQ ID NO: 54059 - DNA, 19 bp, Homo Sapiens
cgaaaccgggcggaaacac

SEQ ID NO: 54060 - DNA, 32 bp, Homo Sapiens; identical to SEQ ID NO: 15365

SEQ ID NO: 54061 - DNA, 33 bp, Homo Sapiens; identical to SEQ ID NO: 1372

SEQ ID NO: 54062 - DNA, 21 bp, Homo Sapiens
ttcgaaaccgggcagaagcac

SEQ ID NO: 54063 - DNA, 36 bp, Homo Sapiens; identical to SEQ ID NO: 14082

SEQ ID NO: 54064 - DNA, 24 bp, Homo Sapiens
tgttcgaatcacgtcggggtcacc

SEQ ID NO: 54065 - DNA, 42 bp, Homo Sapiens; identical to SEQ ID NO: 30795

SEQ ID NO: 54066 - DNA, 24 bp, Homo Sapiens
agttcgagcctcacctggagcacc

SEQ ID NO: 54067 - DNA, 20 bp, Homo Sapiens
cgaatcctgctcacagcgcc

SEQ ID NO: 54068 - DNA, 25 bp, Homo Sapiens
agggattgtgggttcgagtcccatc

SEQ ID NO: 54069 - DNA, 23 bp, Homo Sapiens
gttcaaatcccggacgagccccc

SEQ ID NO: 54070 - DNA, 22 bp, Homo Sapiens
gttcgaatcccactcctgacac

SEQ ID NO: 54071 - DNA, 19 bp, Homo Sapiens
cagagtggcgcagcggaag

SEQ ID NO: 54072 - DNA, 20 bp, Homo Sapiens
gttcaagtccctgttcgggc

SEQ ID NO: 54073 - DNA, 22 bp, Homo Sapiens
ttcgagtcctgccgcggtcgcc

SEQ ID NO: 54074 - DNA, 30 bp, Homo Sapiens; identical to SEQ ID NO: 24572

SEQ ID NO: 54075 - DNA, 33 bp, Homo Sapiens; identical to SEQ ID NO: 24641

SEQ ID NO: 54076 - DNA, 27 bp, Homo Sapiens
gtgggtttaagtcccattggtctagcc

SEQ ID NO: 54077 - DNA, 21 bp, Homo Sapiens
tcgagtcccttcgtggtcgcc

SEQ ID NO: 54078 - DNA, 18 bp, Homo Sapiens
attcccggccaatgcacc

SEQ ID NO: 54079 - DNA, 17 bp, Homo Sapiens
gggtagagcatttgact

SEQ ID NO: 54080 - DNA, 34 bp, Homo Sapiens; identical to SEQ ID NO: 17232

SEQ ID NO: 54081 - DNA, 24 bp, Homo Sapiens
ggttcgaatcccacttctgacacc

SEQ ID NO: 54082 - DNA, 22 bp, Homo Sapiens
gttcgaatccgagtcacggcac

SEQ ID NO: 54083 - DNA, 37 bp, Homo Sapiens; identical to SEQ ID NO: 29436

SEQ ID NO: 54084 - DNA, 20 bp, Homo Sapiens
cgaatccggctcggaggacc

SEQ ID NO: 54085 - DNA, 17 bp, Homo Sapiens
aatccgggtgccccctc

SEQ ID NO: 54086 - DNA, 22 bp, Homo Sapiens
atcgatgcccgcatcctccacc

SEQ ID NO: 54087 - DNA, 23 bp, Homo Sapiens
gttcgagtcccatctgggtcgcc

SEQ ID NO: 54088 - DNA, 20 bp, Homo Sapiens
cgagcccacccagggacgcc

SEQ ID NO: 54089 - DNA, 40 bp, Homo Sapiens; identical to SEQ ID NO: 23000

SEQ ID NO: 54090 - DNA, 27 bp, Homo Sapiens
agctcagtcggtagagcatgggactct

SEQ ID NO: 54091 - DNA, 19 bp, Homo Sapiens
tctgaaggtcctgagttcg

SEQ ID NO: 54092 - DNA, 24 bp, Homo Sapiens
cggggttcgattccccgacgggga

SEQ ID NO: 54093 - DNA, 18 bp, Homo Sapiens
atccccagcatctccacc

SEQ ID NO: 54094 - DNA, 23 bp, Homo Sapiens
gttcgaatcccacttctgacacc

SEQ ID NO: 54095 - DNA, 36 bp, Homo Sapiens; identical to SEQ ID NO: 24650

SEQ ID NO: 54096 - DNA, 16 bp, Homo Sapiens
aatccggctcgaagga

SEQ ID NO: 54097 - DNA, 42 bp, Homo Sapiens; identical to SEQ ID NO: 9435

SEQ ID NO: 54098 - DNA, 22 bp, Homo Sapiens
gttcgattcccggccaacgcac

SEQ ID NO: 54099 - DNA, 21 bp, Homo Sapiens
ttcaaatcacgtcggggtcac

SEQ ID NO: 54100 - DNA, 24 bp, Homo Sapiens
ggttcgaatcccactcctgacacc

SEQ ID NO: 54101 - DNA, 37 bp, Homo Sapiens; identical to SEQ ID NO: 24648

SEQ ID NO: 54102 - DNA, 29 bp, Homo Sapiens
atggtctagcggttaggattcctggtttt

SEQ ID NO: 54103 - DNA, 24 bp, Homo Sapiens
ggttcaagtccctgttcgggcgcc

SEQ ID NO: 54104 - DNA, 23 bp, Homo Sapiens
gttcgaaccccgtccgtgcctcc

SEQ ID NO: 54105 - DNA, 17 bp, Homo Sapiens
gggtgtgataggtggca

SEQ ID NO: 54106 - DNA, 16 bp, Homo Sapiens
aaatgtttagacgggc

SEQ ID NO: 54107 - DNA, 41 bp, Homo Sapiens; identical to SEQ ID NO: 23029

SEQ ID NO: 54108 - DNA, 20 bp, Homo Sapiens
gtagaattctcgcctgccac

SEQ ID NO: 54109 - DNA, 17 bp, Homo Sapiens
aatcccactcctgacac

SEQ ID NO: 54110 - DNA, 28 bp, Homo Sapiens
agaagcagcttcaaacctgccggggctt

SEQ ID NO: 54111 - DNA, 16 bp, Homo Sapiens
tgagggtccagggttc

SEQ ID NO: 54112 - DNA, 17 bp, Homo Sapiens
atcccgggtttcggcac

SEQ ID NO: 54113 - DNA, 20 bp, Homo Sapiens
caaatctcggtgggacctcc

SEQ ID NO: 54114 - DNA, 23 bp, Homo Sapiens
agttcaaatctcgctggggcctc

SEQ ID NO: 54115 - DNA, 20 bp, Homo Sapiens
aggtcgatggatcgaaacca

SEQ ID NO: 54116 - DNA, 32 bp, Homo Sapiens; identical to SEQ ID NO: 12011

SEQ ID NO: 54117 - DNA, 24 bp, Homo Sapiens
agttcaaatctcggtggaacctcc

SEQ ID NO: 54118 - DNA, 18 bp, Homo Sapiens
tcgaaaccatcctctgct

SEQ ID NO: 54119 - DNA, 22 bp, Homo Sapiens
agaggtcgatggatcgaaacca

SEQ ID NO: 54120 - DNA, 33 bp, Homo Sapiens; identical to SEQ ID NO: 11964

SEQ ID NO: 54121 - DNA, 19 bp, Homo Sapiens
cttcaaacctgccggggct

SEQ ID NO: 54122 - DNA, 23 bp, Homo Sapiens
gttcgaatcccactcctgacacc

SEQ ID NO: 54123 - DNA, 36 bp, Homo Sapiens; identical to SEQ ID NO: 2162

SEQ ID NO: 54124 - DNA, 23 bp, Homo Sapiens
gttcgaatcccagcggggcctcc

SEQ ID NO: 54125 - DNA, 22 bp, Homo Sapiens
ttcaaatctcggtgggacctcc

SEQ ID NO: 54126 - DNA, 19 bp, Homo Sapiens
gaatcccaccgctgccacc

SEQ ID NO: 54127 - DNA, 17 bp, Homo Sapiens
tggttatcacgtctgct

SEQ ID NO: 54128 - DNA, 20 bp, Homo Sapiens
cgcgaaaggtccccggttcg

SEQ ID NO: 54129 - DNA, 21 bp, Homo Sapiens
tcgtaaaccgaagatcgcggg

SEQ ID NO: 54130 - DNA, 18 bp, Homo Sapiens
attcccggtcagggaacc

SEQ ID NO: 54131 - DNA, 37 bp, Homo Sapiens; identical to SEQ ID NO: 11015

SEQ ID NO: 54132 - DNA, 29 bp, Homo Sapiens
gattccaggttcgactcctggctggctcg

SEQ ID NO: 54133 - DNA, 31 bp, Homo Sapiens; identical to SEQ ID NO: 17229

SEQ ID NO: 54134 - DNA, 20 bp, Homo Sapiens
cgactcccggtgtgggaacc

SEQ ID NO: 54135 - DNA, 22 bp, Homo Sapiens
gttcaaatcccggacgagcccc

SEQ ID NO: 54136 - DNA, 23 bp, Homo Sapiens
gttcgaatcccttcgtggttgcc

SEQ ID NO: 54137 - DNA, 23 bp, Homo Sapiens
gttcgattcccggccaacgcacc

SEQ ID NO: 54138 - DNA, 18 bp, Homo Sapiens
aatccgggtgccccctcc

SEQ ID NO: 54139 - DNA, 37 bp, Homo Sapiens; identical to SEQ ID NO: 14083

SEQ ID NO: 54140 - DNA, 21 bp, Homo Sapiens
tcaaatctcggtgggacctcc

SEQ ID NO: 54141 - DNA, 37 bp, Homo Sapiens; identical to SEQ ID NO: 14011

SEQ ID NO: 54142 - DNA, 18 bp, Homo Sapiens
gttcaaatctcgctgggg

SEQ ID NO: 54143 - DNA, 16 bp, Homo Sapiens
ggtagagcatgagact

SEQ ID NO: 54144 - DNA, 26 bp, Homo Sapiens
aagcagcttcaaacctgccggggctt

SEQ ID NO: 54145 - DNA, 37 bp, Homo Sapiens; identical to SEQ ID NO: 10422

SEQ ID NO: 54146 - DNA, 47 bp, Homo Sapiens; identical to SEQ ID NO: 15057

SEQ ID NO: 54147 - DNA, 25 bp, Homo Sapiens
tggtctaggggtatgattctcgctt

SEQ ID NO: 54148 - DNA, 19 bp, Homo Sapiens
agcatgggactcttaatcc

SEQ ID NO: 54149 - DNA, 28 bp, Homo Sapiens
accttttaagttaaagattaagagaacc

SEQ ID NO: 54150 - DNA, 32 bp, Homo Sapiens; identical to SEQ ID NO: 18724

SEQ ID NO: 54151 - DNA, 34 bp, Homo Sapiens; identical to SEQ ID NO: 8949

SEQ ID NO: 54152 - DNA, 25 bp, Homo Sapiens
tggtgtagtggtatcatgcaagatt

SEQ ID NO: 54153 - DNA, 23 bp, Homo Sapiens
ggttcgagtcccttcgtggtcgc

SEQ ID NO: 54154 - DNA, 19 bp, Homo Sapiens
atgtagctcagtggtagag

SEQ ID NO: 54155 - DNA, 29 bp, Homo Sapiens
aagaagcagcttcaaacctgccggggctt

SEQ ID NO: 54156 - DNA, 17 bp, Homo Sapiens
aacgaatgatttcgact

SEQ ID NO: 54157 - DNA, 19 bp, Homo Sapiens
cgatcccgggtttcggcac

SEQ ID NO: 54158 - DNA, 28 bp, Homo Sapiens
cgatggatcgaaaccatcctctgctacc

SEQ ID NO: 54159 - DNA, 16 bp, Homo Sapiens
agctatccattggtct

SEQ ID NO: 54160 - DNA, 20 bp, Homo Sapiens
tcgatcccgggtttcggcac

SEQ ID NO: 54161 - DNA, 38 bp, Homo Sapiens; identical to SEQ ID NO: 3099

SEQ ID NO: 54162 - DNA, 34 bp, Homo Sapiens; identical to SEQ ID NO: 4971

SEQ ID NO: 54163 - DNA, 23 bp, Homo Sapiens
gttcgaatcacgtcggggtcacc

SEQ ID NO: 54164 - DNA, 23 bp, Homo Sapiens
gttcgagtcccatctggggtgcc

SEQ ID NO: 54165 - DNA, 27 bp, Homo Sapiens
atggtctagcggttaggattcctggtt

SEQ ID NO: 54166 - DNA, 18 bp, Homo Sapiens
cgatcccgggtttcggca

SEQ ID NO: 54167 - DNA, 22 bp, Homo Sapiens
ggttcgaatcccaccgctgcca

SEQ ID NO: 54168 - DNA, 17 bp, Homo Sapiens
cgaaaccatcctctgct

SEQ ID NO: 54169 - DNA, 37 bp, Homo Sapiens; identical to SEQ ID NO: 26881

SEQ ID NO: 54170 - DNA, 23 bp, Homo Sapiens
gttcgaatcctgccgactacgcc

SEQ ID NO: 54171 - DNA, 22 bp, Homo Sapiens
ggggtgtagctcagtggtagag

SEQ ID NO: 54172 - DNA, 19 bp, Homo Sapiens
cgaatcccacttctgacac

SEQ ID NO: 54173 - DNA, 21 bp, Homo Sapiens
tcgaatcctgttcgtgacgcc

SEQ ID NO: 54174 - DNA, 20 bp, Homo Sapiens
cgaatccgagtcacggcacc

SEQ ID NO: 54175 - DNA, 24 bp, Homo Sapiens
ggttcgaatcccaccgctgccacc

SEQ ID NO: 54176 - DNA, 23 bp, Homo Sapiens
gatcgatgcccgcatcctccacc

SEQ ID NO: 54177 - DNA, 18 bp, Homo Sapiens
cgaatcccacttctgaca

SEQ ID NO: 54178 - DNA, 23 bp, Homo Sapiens
ggttcgaatcccagcggtgcctc

SEQ ID NO: 54179 - DNA, 21 bp, Homo Sapiens
gttcgattcccggccaacgca

SEQ ID NO: 54180 - DNA, 35 bp, Homo Sapiens; identical to SEQ ID NO: 17233

SEQ ID NO: 54181 - DNA, 22 bp, Homo Sapiens
ttcgaatcccaccgctgccacc

SEQ ID NO: 54182 - DNA, 21 bp, Homo Sapiens
tggtctaggggtatgattctc

SEQ ID NO: 54183 - DNA, 18 bp, Homo Sapiens
aaaccatcctctgctacc

SEQ ID NO: 54184 - DNA, 20 bp, Homo Sapiens
acttaagatccaatggacat

SEQ ID NO: 54185 - DNA, 22 bp, Homo Sapiens
ttcgaatcccagcggtgcctcc

SEQ ID NO: 54186 - DNA, 22 bp, Homo Sapiens
tttccgtagtgtagtggtcatc

SEQ ID NO: 54187 - DNA, 39 bp, Homo Sapiens; identical to SEQ ID NO: 3100

SEQ ID NO: 54188 - DNA, 18 bp, Homo Sapiens
ccgaaaggttggtggttc

SEQ ID NO: 54189 - DNA, 36 bp, Homo Sapiens; identical to SEQ ID NO: 16643

SEQ ID NO: 54190 - DNA, 18 bp, Homo Sapiens
gatcccgggtttcggcac

SEQ ID NO: 54191 - DNA, 21 bp, Homo Sapiens
gttcgagcctcacctggagca

SEQ ID NO: 54192 - DNA, 21 bp, Homo Sapiens
agaggtcgatggatcgaaacc

SEQ ID NO: 54193 - DNA, 18 bp, Homo Sapiens
agccccagtggaaccacc

SEQ ID NO: 54194 - DNA, 24 bp, Homo Sapiens
atggccgagcggtctaaggcgctg

SEQ ID NO: 54195 - DNA, 22 bp, Homo Sapiens
ttcgaatcccacttctgacacc

SEQ ID NO: 54196 - DNA, 20 bp, Homo Sapiens
caaatctcgctggggcctcc

SEQ ID NO: 54197 - DNA, 22 bp, Homo Sapiens
ggttcgaaaccgggcggaaaca

SEQ ID NO: 54198 - DNA, 22 bp, Homo Sapiens
gcagcgatggccgagtggttaa

SEQ ID NO: 54199 - DNA, 20 bp, Homo Sapiens
tcgaatcctgccgactacgc

SEQ ID NO: 54200 - DNA, 23 bp, Homo Sapiens
accaggatggccgagtggttaag

SEQ ID NO: 54201 - DNA, 18 bp, Homo Sapiens
ggtctagcggttaggatt

SEQ ID NO: 54202 - DNA, 23 bp, Homo Sapiens
aggttcgactcctggctggctcg

SEQ ID NO: 54203 - DNA, 20 bp, Homo Sapiens
tcgagtcctgccgcggtcgc

SEQ ID NO: 54204 - DNA, 32 bp, Homo Sapiens; identical to SEQ ID NO: 18754

SEQ ID NO: 54205 - DNA, 33 bp, Homo Sapiens; identical to SEQ ID NO: 16633

SEQ ID NO: 54206 - DNA, 16 bp, Homo Sapiens
agctcagtcggtagag

SEQ ID NO: 54207 - DNA, 21 bp, Homo Sapiens
gttcgaatcccaccgctgcca

SEQ ID NO: 54208 - DNA, 16 bp, Homo Sapiens
ggccgtgatcgtatag

SEQ ID NO: 54209 - DNA, 18 bp, Homo Sapiens
aggtcgatggatcgaaac

SEQ ID NO: 54210 - DNA, 29 bp, Homo Sapiens
atatggtctagcggttaggattcctggtt

SEQ ID NO: 54211 - DNA, 21 bp, Homo Sapiens
ttcgatcccgggtttcggcac

SEQ ID NO: 54212 - DNA, 27 bp, Homo Sapiens
gccgctggtgtagtggtatcatgcaag

SEQ ID NO: 54213 - DNA, 24 bp, Homo Sapiens
cctggtggtctagtggttaggatt

SEQ ID NO: 54214 - DNA, 17 bp, Homo Sapiens
taggattcggcgctctc

SEQ ID NO: 54215 - DNA, 19 bp, Homo Sapiens
ttgggtgcgagaggtcccg

SEQ ID NO: 54216 - DNA, 24 bp, Homo Sapiens
gggttcgagtcccttcgtggtcgc

SEQ ID NO: 54217 - DNA, 23 bp, Homo Sapiens
gttcaatccccggcacctccacc

SEQ ID NO: 54218 - DNA, 23 bp, Homo Sapiens
ggttcgaaaccgggcggaaacac

SEQ ID NO: 54219 - DNA, 20 bp, Homo Sapiens
caagtcacgtcggggtcacc

SEQ ID NO: 54220 - DNA, 18 bp, Homo Sapiens
agcatgggactcttaatc

SEQ ID NO: 54221 - DNA, 19 bp, Homo Sapiens
aatcctgttcgtgacgcca

SEQ ID NO: 54222 - DNA, 25 bp, Homo Sapiens
gatggccgagcggtctaaggcgctg

SEQ ID NO: 54223 - DNA, 20 bp, Homo Sapiens
cgaatcctgccgactacgcc

SEQ ID NO: 54224 - DNA, 21 bp, Homo Sapiens
tcaagtcacgtcggggtcacc

SEQ ID NO: 54225 - DNA, 18 bp, Homo Sapiens
caagttctggtctccgga

SEQ ID NO: 54226 - DNA, 26 bp, Homo Sapiens
ctggtgtagtggtatcatgcaagatt

SEQ ID NO: 54227 - DNA, 19 bp, Homo Sapiens
tcgaatccgagtcacggca

SEQ ID NO: 54228 - DNA, 24 bp, Homo Sapiens
ggtctaggggtatgattctcgctt

SEQ ID NO: 54229 - DNA, 21 bp, Homo Sapiens
tcgagcctcacctggagcacc

SEQ ID NO: 54230 - DNA, 20 bp, Homo Sapiens
tcgaatcacgtcggggtcac

SEQ ID NO: 54231 - DNA, 20 bp, Homo Sapiens
tcgaatcccacttctgacac

SEQ ID NO: 54232 - DNA, 23 bp, Homo Sapiens
gttcgaatcccagcggtgcctcc

SEQ ID NO: 54233 - DNA, 19 bp, Homo Sapiens
aatccgagtcacggcacca

SEQ ID NO: 54234 - DNA, 25 bp, Homo Sapiens
ggtgagcactctggactctgaatcc

SEQ ID NO: 54235 - DNA, 26 bp, Homo Sapiens
tggtgtaatggtaagcactctggact

SEQ ID NO: 54236 - DNA, 18 bp, Homo Sapiens
gtatagtggttagtactc

SEQ ID NO: 54237 - DNA, 23 bp, Homo Sapiens
gttcgaatcccaccgctgccacc

SEQ ID NO: 54238 - DNA, 19 bp, Homo Sapiens
aaatctcggtggaacctcc

SEQ ID NO: 54239 - DNA, 22 bp, Homo Sapiens
ttcgaatccggctcgaaggacc

SEQ ID NO: 54240 - DNA, 29 bp, Homo Sapiens
ctgcgtgttcgaatcacgtcggggtcacc

SEQ ID NO: 54241 - DNA, 19 bp, Homo Sapiens
gattcccggtcagggaacc

SEQ ID NO: 54242 - DNA, 37 bp, Homo Sapiens; identical to SEQ ID NO: 19699

SEQ ID NO: 54243 - DNA, 24 bp, Homo Sapiens
ggttcgagccccacgttgggcgcc

SEQ ID NO: 54244 - DNA, 22 bp, Homo Sapiens
ttcaaatcccggacgagccccc

SEQ ID NO: 54245 - DNA, 16 bp, Homo Sapiens
cgattcccggtcaggg

SEQ ID NO: 54246 - DNA, 36 bp, Homo Sapiens; identical to SEQ ID NO: 26685

SEQ ID NO: 54247 - DNA, 36 bp, Homo Sapiens; identical to SEQ ID NO: 42665

SEQ ID NO: 54248 - DNA, 22 bp, Homo Sapiens
tccctggtctagtggttaggat

SEQ ID NO: 54249 - DNA, 18 bp, Homo Sapiens
ggatagctcagtcggtag

SEQ ID NO: 54250 - DNA, 22 bp, Homo Sapiens
accaggatggccgagtggttaa

SEQ ID NO: 54251 - DNA, 23 bp, Homo Sapiens
gctagctcagtcggtagagcatg

SEQ ID NO: 54252 - DNA, 19 bp, Homo Sapiens
gatcccgggtttcggcacc

SEQ ID NO: 54253 - DNA, 18 bp, Homo Sapiens
aaatctcggtggaacctc

SEQ ID NO: 54254 - DNA, 22 bp, Homo Sapiens
ttcgattccggctcgaaggacc

SEQ ID NO: 54255 - DNA, 19 bp, Homo Sapiens
cgagtcctgccgcggtcgc

SEQ ID NO: 54256 - DNA, 16 bp, Homo Sapiens
ccattcttgcgacccg

SEQ ID NO: 54257 - DNA, 19 bp, Homo Sapiens
gctttcaccgccgcggccc

SEQ ID NO: 54258 - DNA, 21 bp, Homo Sapiens
tcaaatctcggtggaacctcc

SEQ ID NO: 54259 - DNA, 22 bp, Homo Sapiens
gttcgaatcccagcggtgcctc

SEQ ID NO: 54260 - DNA, 19 bp, Homo Sapiens
agtccctgttcgggcgcca

SEQ ID NO: 54261 - DNA, 21 bp, Homo Sapiens
tctagtggttaggattcggcg

SEQ ID NO: 54262 - DNA, 24 bp, Homo Sapiens
agcagagtggcgcagcggaagcgt

SEQ ID NO: 54263 - DNA, 20 bp, Homo Sapiens
ggatagctcagtcggtagag

SEQ ID NO: 54264 - DNA, 16 bp, Homo Sapiens
attgtgaatctgacaa

SEQ ID NO: 54265 - DNA, 24 bp, Homo Sapiens
ggttcaattccccgacggggagcc

SEQ ID NO: 54266 - DNA, 20 bp, Homo Sapiens
tcgaatccgagtcacggcac

SEQ ID NO: 54267 - DNA, 19 bp, Homo Sapiens
cgaatccggctcgaaggac

SEQ ID NO: 54268 - DNA, 20 bp, Homo Sapiens
cgattcccggtcagggaacc

SEQ ID NO: 54269 - DNA, 22 bp, Homo Sapiens
gtctagtggttaggattcggcg

SEQ ID NO: 54270 - DNA, 17 bp, Homo Sapiens
gcactctggactttgaa

SEQ ID NO: 54271 - DNA, 17 bp, Homo Sapiens
ggccgtgatcgtatagt

SEQ ID NO: 54272 - DNA, 18 bp, Homo Sapiens
aatctcggtggaacctcc

SEQ ID NO: 54273 - DNA, 21 bp, Homo Sapiens
ttcaaatcccggacgagcccc

SEQ ID NO: 54274 - DNA, 16 bp, Homo Sapiens
gttcgactcccggtgt

SEQ ID NO: 54275 - DNA, 23 bp, Homo Sapiens
gttcgaatccggctcgaaggacc

SEQ ID NO: 54276 - DNA, 20 bp, Homo Sapiens
ttcgaaaccgggcggaaaca

SEQ ID NO: 54277 - DNA, 24 bp, Homo Sapiens
gtcaggatggccgagtggtctaag

SEQ ID NO: 54278 - DNA, 19 bp, Homo Sapiens
tgattctcggtttgggtcc

SEQ ID NO: 54279 - DNA, 20 bp, Homo Sapiens
cgattccccgacggggagcc

SEQ ID NO: 54280 - DNA, 22 bp, Homo Sapiens
gttcgaatccggctcgaaggac

SEQ ID NO: 54281 - DNA, 29 bp, Homo Sapiens
tcgatggatcgaaaccatcctctgctacc

SEQ ID NO: 54282 - DNA, 20 bp, Homo Sapiens
gaggtcgatggatcgaaacc

SEQ ID NO: 54283 - DNA, 17 bp, Homo Sapiens
cggttaggattcctggt

SEQ ID NO: 54284 - DNA, 21 bp, Homo Sapiens
tcgaaaccgggcggaaacacc

SEQ ID NO: 54285 - DNA, 33 bp, Homo Sapiens; identical to SEQ ID NO: 17231

SEQ ID NO: 54286 - DNA, 17 bp, Homo Sapiens
gtctagtggttaggatt

SEQ ID NO: 54287 - DNA, 17 bp, Homo Sapiens
ctttttccaaggacacc

SEQ ID NO: 54288 - DNA, 21 bp, Homo Sapiens
gttcgaatcccatcctcgtcg

SEQ ID NO: 54289 - DNA, 25 bp, Homo Sapiens
gggttcgagtcccttcgtggtcgcc

SEQ ID NO: 54290 - DNA, 16 bp, Homo Sapiens
ccggagatgaaaacct

SEQ ID NO: 54291 - DNA, 24 bp, Homo Sapiens
ggttcgaatcccatcctcgtcgcc

SEQ ID NO: 54292 - DNA, 21 bp, Homo Sapiens
gaggtggccgagtggttaagg

SEQ ID NO: 54293 - DNA, 17 bp, Homo Sapiens
tggtagagcatttgact

SEQ ID NO: 54294 - DNA, 22 bp, Homo Sapiens
ttcgaaaccgggcggaaacacc

SEQ ID NO: 54295 - DNA, 22 bp, Homo Sapiens
gggatgtagctcagtggtagag

SEQ ID NO: 54296 - DNA, 21 bp, Homo Sapiens
ttcgaaaccgggcggaaacac

SEQ ID NO: 54297 - DNA, 19 bp, Homo Sapiens
tcgaaaccgggcggaaaca

SEQ ID NO: 54298 - DNA, 23 bp, Homo Sapiens
gttcgaatcccatcctcgtcgcc

SEQ ID NO: 54299 - DNA, 18 bp, Homo Sapiens
aaaccgggcggaaacacc

SEQ ID NO: 54300 - DNA, 23 bp, Homo Sapiens
atgaaaacctttttccaaggaca

SEQ ID NO: 54301 - DNA, 24 bp, Homo Sapiens
ctagtggttaggattcggcgctct

SEQ ID NO: 54302 - DNA, 28 bp, Homo Sapiens
cccggctagctcagtcggtagagcatgg

SEQ ID NO: 54303 - DNA, 22 bp, Homo Sapiens
ttcgattccccgacggggagcc

SEQ ID NO: 54304 - DNA, 17 bp, Homo Sapiens
gggtatgattctcgctt

SEQ ID NO: 54305 - DNA, 22 bp, Homo Sapiens
ctcagtggtagagcatttgact

SEQ ID NO: 54306 - DNA, 20 bp, Homo Sapiens
cgagtcctgccgcggtcgcc

SEQ ID NO: 54307 - DNA, 21 bp, Homo Sapiens
tcgaatcccaccgctgccacc

SEQ ID NO: 54308 - DNA, 16 bp, Homo Sapiens
ccgggcagaagcacca

SEQ ID NO: 54309 - DNA, 20 bp, Homo Sapiens
tcgaaaccgggcggaaacac

SEQ ID NO: 54310 - DNA, 18 bp, Homo Sapiens
gttagcactctggactct

SEQ ID NO: 54311 - DNA, 18 bp, Homo Sapiens
cttccaagcagttgaccc

SEQ ID NO: 54312 - DNA, 36 bp, Homo Sapiens; identical to SEQ ID NO: 26880

SEQ ID NO: 54313 - DNA, 25 bp, Homo Sapiens
aaggataacagctatccattggtct

SEQ ID NO: 54314 - DNA, 22 bp, Homo Sapiens
gttcgaatcccatcctcgtcgc

SEQ ID NO: 54315 - DNA, 36 bp, Homo Sapiens; identical to SEQ ID NO: 25536

SEQ ID NO: 54316 - DNA, 36 bp, Homo Sapiens; identical to SEQ ID NO: 22610

SEQ ID NO: 54317 - DNA, 21 bp, Homo Sapiens
cggatagctcagtcggtagag

SEQ ID NO: 54318 - DNA, 20 bp, Homo Sapiens
ttaggcctctttttaccacc

SEQ ID NO: 54319 - DNA, 17 bp, Homo Sapiens
ctcccggtgtgggaacc

SEQ ID NO: 54320 - DNA, 24 bp, Homo Sapiens
cgtggttgtagtccgtgcgagaat

SEQ ID NO: 54321 - DNA, 27 bp, Homo Sapiens
tagctcagtcggtagagcatgggactc

SEQ ID NO: 54322 - DNA, 23 bp, Homo Sapiens
cagtcggtagagcatgggactct

SEQ ID NO: 54323 - DNA, 23 bp, Homo Sapiens
gatcgaaaccatcctctgctacc

SEQ ID NO: 54324 - DNA, 25 bp, Homo Sapiens
gctcagtcggtagagcatgggactc

SEQ ID NO: 54325 - DNA, 22 bp, Homo Sapiens
tgaaaacctttttccaaggaca

SEQ ID NO: 54326 - DNA, 32 bp, Homo Sapiens; identical to SEQ ID NO: 9765

SEQ ID NO: 54327 - DNA, 31 bp, Homo Sapiens; identical to SEQ ID NO: 27987

SEQ ID NO: 54328 - DNA, 33 bp, Homo Sapiens; identical to SEQ ID NO: 25909

SEQ ID NO: 54329 - DNA, 18 bp, Homo Sapiens
aatcccactcctgacacc

SEQ ID NO: 54330 - DNA, 31 bp, Homo Sapiens; identical to SEQ ID NO: 2233

SEQ ID NO: 54331 - DNA, 23 bp, Homo Sapiens
ttcaaatcccggacgagccccca

SEQ ID NO: 54332 - DNA, 21 bp, Homo Sapiens
gtagtggtatcatgcaagatt

SEQ ID NO: 54333 - DNA, 19 bp, Homo Sapiens
aaaccgggcggaaacacca

SEQ ID NO: 54334 - DNA, 23 bp, Homo Sapiens
cgtggttgtagtccgtgcgagaa

SEQ ID NO: 54335 - DNA, 16 bp, Homo Sapiens
tagcactctggactct

SEQ ID NO: 54336 - DNA, 22 bp, Homo Sapiens
agtggtagaattctcgcctgcc

SEQ ID NO: 54337 - DNA, 29 bp, Homo Sapiens
cagagtggcgcagcggaagcgtgctgggc

SEQ ID NO: 54338 - DNA, 16 bp, Homo Sapiens
ccttcgatagctcagc

SEQ ID NO: 54339 - DNA, 19 bp, Homo Sapiens
gtcggtagagcatgggact

SEQ ID NO: 54340 - DNA, 22 bp, Homo Sapiens
tggtagaattctcgcctgccac

SEQ ID NO: 54341 - DNA, 16 bp, Homo Sapiens
cccggcccatgcacca

SEQ ID NO: 54342 - DNA, 17 bp, Homo Sapiens
ctctgcgttgtggccgc

SEQ ID NO: 54343 - DNA, 21 bp, Homo Sapiens
gttaggcctctttttaccacc

SEQ ID NO: 54344 - DNA, 22 bp, Homo Sapiens
ctagcggttaggattcctggtt

SEQ ID NO: 54345 - DNA, 27 bp, Homo Sapiens
gggggtatagctcagtggtagagcatt

SEQ ID NO: 54346 - DNA, 27 bp, Homo Sapiens
tcattggtcgtggttgtagtccgtgcg

SEQ ID NO: 54347 - DNA, 19 bp, Homo Sapiens
cggatagctcagtcggtag

SEQ ID NO: 54348 - DNA, 21 bp, Homo Sapiens
ttcgattccccgacggggagc

SEQ ID NO: 54349 - DNA, 16 bp, Homo Sapiens
tagaattctcgcctgc

SEQ ID NO: 54350 - DNA, 20 bp, Homo Sapiens
aaatcccggacgagccccca

SEQ ID NO: 54351 - DNA, 25 bp, Homo Sapiens
gccccagtggcctaatggataaggc

SEQ ID NO: 54352 - DNA, 23 bp, Homo Sapiens
ggttcgactcccggtatgggaac

SEQ ID NO: 54353 - DNA, 22 bp, Homo Sapiens
gggggattagctcaaatggtag

SEQ ID NO: 54354 - DNA, 21 bp, Homo Sapiens
tggtctagcggttaggattcc

SEQ ID NO: 54355 - DNA, 25 bp, Homo Sapiens
tgtaatggttagcactctggactct

SEQ ID NO: 54356 - DNA, 17 bp, Homo Sapiens
atccgggtgccccctcc

SEQ ID NO: 54357 - DNA, 16 bp, Homo Sapiens
ggggtatgattctcgc

SEQ ID NO: 54358 - DNA, 22 bp, Homo Sapiens
ggttgtagtccgtgcgagaata

SEQ ID NO: 54359 - DNA, 25 bp, Homo Sapiens
gggttcgattcccggtcagggaacc

SEQ ID NO: 54360 - DNA, 25 bp, Homo Sapiens
ctggtggtctagtggttaggattcg

SEQ ID NO: 54361 - DNA, 30 bp, Homo Sapiens; identical to SEQ ID NO: 2232

SEQ ID NO: 54362 - DNA, 19 bp, Homo Sapiens
ggtagaattctcgcctgcc

SEQ ID NO: 54363 - DNA, 30 bp, Homo Sapiens; identical to SEQ ID NO: 12384

SEQ ID NO: 54364 - DNA, 17 bp, Homo Sapiens
gtttatgtagcttacct

SEQ ID NO: 54365 - DNA, 21 bp, Homo Sapiens
tagtggttatcacgttcgcct

SEQ ID NO: 54366 - DNA, 18 bp, Homo Sapiens
gtcggtagagcatgggac

SEQ ID NO: 54367 - DNA, 27 bp, Homo Sapiens
tggttaggattcggcgctctcaccgcc

SEQ ID NO: 54368 - DNA, 23 bp, Homo Sapiens
gttcgactcccggtgtgggaacc

SEQ ID NO: 54369 - DNA, 27 bp, Homo Sapiens
tatagctcagtggtagagcatttgact

SEQ ID NO: 54370 - DNA, 25 bp, Homo Sapiens
ggttagcactctggactctgaatcc

SEQ ID NO: 54371 - DNA, 22 bp, Homo Sapiens
tcctcgttagtatagtggtgag

SEQ ID NO: 54372 - DNA, 22 bp, Homo Sapiens
ttgtagtccgtgcgagaatacc

SEQ ID NO: 54373 - DNA, 25 bp, Homo Sapiens
tggttgtagtccgtgcgagaatacc

SEQ ID NO: 54374 - DNA, 17 bp, Homo Sapiens
ttcaaatcccggacgag

SEQ ID NO: 54375 - DNA, 27 bp, Homo Sapiens
ggtggtctagtggttaggattcggcgc

SEQ ID NO: 54376 - DNA, 18 bp, Homo Sapiens
ggggtatgattctcgctt

SEQ ID NO: 54377 - DNA, 19 bp, Homo Sapiens
ggcgcggtggccaagtggt

SEQ ID NO: 54378 - DNA, 25 bp, Homo Sapiens
tcccacatggtctagcggttaggat

SEQ ID NO: 54379 - DNA, 22 bp, Homo Sapiens
gttcgactcccggtatgggaac

SEQ ID NO: 54380 - DNA, 20 bp, Homo Sapiens
tggttagcactctggactct

SEQ ID NO: 54381 - DNA, 21 bp, Homo Sapiens
gggggtgtagctcagtggtag

SEQ ID NO: 54382 - DNA, 26 bp, Homo Sapiens
gatttcaacttaacttgaccgctctg

SEQ ID NO: 54383 - DNA, 23 bp, Homo Sapiens
gtttccgtagtgtagcggttatc

SEQ ID NO: 54384 - DNA, 24 bp, Homo Sapiens
tggttaggattcggcgctctcacc

SEQ ID NO: 54385 - DNA, 21 bp, Homo Sapiens
cgattcccggccaacgcacca

SEQ ID NO: 54386 - DNA, 23 bp, Homo Sapiens
tcgtggttgtagtccgtgcgaga

SEQ ID NO: 54387 - DNA, 26 bp, Homo Sapiens
gttcagtggtagaattctcgcctgcc

SEQ ID NO: 54388 - DNA, 28 bp, Homo Sapiens
gtttccgtagtgtagtggttatcacgtt

SEQ ID NO: 54389 - DNA, 17 bp, Homo Sapiens
ggctcgttggtctaggg

SEQ ID NO: 54390 - DNA, 23 bp, Homo Sapiens
gttcgattcccggtcagggaacc

SEQ ID NO: 54391 - DNA, 26 bp, Homo Sapiens
gggttcgattcccggtcagggaacca

SEQ ID NO: 54392 - DNA, 23 bp, Homo Sapiens
ggtgtaatggttagcactctgga

SEQ ID NO: 54393 - DNA, 29 bp, Homo Sapiens
gtcgtggttgtagtccgtgcgagaatacc

SEQ ID NO: 54394 - DNA, 23 bp, Homo Sapiens
tggttcagtggtagaattctcgc

SEQ ID NO: 54395 - DNA, 19 bp, Homo Sapiens
cttaacttgaccgctctga

SEQ ID NO: 54396 - DNA, 22 bp, Homo Sapiens
gtttccgtagtgtagtggttat

SEQ ID NO: 54397 - DNA, 23 bp, Homo Sapiens
ggttcgattcccggtcagggaac

SEQ ID NO: 54398 - DNA, 22 bp, Homo Sapiens
ggttcagtggtagaattctcgc

SEQ ID NO: 54399 - DNA, 24 bp, Homo Sapiens
ggttagcactctggactctgaatc

SEQ ID NO: 54400 - DNA, 24 bp, Homo Sapiens
ggttcgattccccgacggggagcc

SEQ ID NO: 54401 - DNA, 23 bp, Homo Sapiens
ggttcgactcccggtgtgggaac

SEQ ID NO: 54402 - DNA, 17 bp, Homo Sapiens
agtggtagaattctcgc

SEQ ID NO: 54403 - DNA, 22 bp, Homo Sapiens
gcccggatagctcagtcggtag

SEQ ID NO: 54404 - DNA, 19 bp, Homo Sapiens
gtttatgtagcttacctcc

SEQ ID NO: 54405 - DNA, 30 bp, Homo Sapiens; identical to SEQ ID NO: 17335

SEQ ID NO: 54406 - DNA, 21 bp, Homo Sapiens
aacttaacttgaccgctctga

SEQ ID NO: 54407 - DNA, 26 bp, Homo Sapiens
gagaaagctcacaagaactgctaact

SEQ ID NO: 54408 - DNA, 18 bp, Homo Sapiens
ggctcgttggtctagggg

SEQ ID NO: 54409 - DNA, 30 bp, Homo Sapiens; identical to SEQ ID NO: 19439

SEQ ID NO: 54410 - DNA, 23 bp, Homo Sapiens
tccctggtggtctagtggttagg

SEQ ID NO: 54411 - DNA, 22 bp, Homo Sapiens
tcccacatggtctagcggttag

SEQ ID NO: 54412 - DNA, 19 bp, Homo Sapiens
ggggatgtagctcagtggt

SEQ ID NO: 54413 - DNA, 30 bp, Homo Sapiens; identical to SEQ ID NO: 25530

SEQ ID NO: 54414 - DNA, 39 bp, Homo Sapiens; identical to SEQ ID NO: 23536

SEQ ID NO: 54415 - DNA, 34 bp, Homo Sapiens; identical to SEQ ID NO: 11183

SEQ ID NO: 54416 - DNA, 37 bp, Homo Sapiens; identical to SEQ ID NO: 11954

SEQ ID NO: 54417 - DNA, 32 bp, Homo Sapiens; identical to SEQ ID NO: 11629

SEQ ID NO: 54418 - DNA, 17 bp, Homo Sapiens
cgagccccagtggaacc

SEQ ID NO: 54419 - DNA, 37 bp, Homo Sapiens; identical to SEQ ID NO: 6739

SEQ ID NO: 54420 - DNA, 24 bp, Homo Sapiens
gcgttcgattcccggtcagggaac

SEQ ID NO: 54421 - DNA, 31 bp, Homo Sapiens; identical to SEQ ID NO: 17081

SEQ ID NO: 54422 - DNA, 43 bp, Homo Sapiens; identical to SEQ ID NO: 15425

SEQ ID NO: 54423 - DNA, 38 bp, Homo Sapiens; identical to SEQ ID NO: 931

SEQ ID NO: 54424 - DNA, 26 bp, Homo Sapiens
agggattgtgggttcgagtcccatct

SEQ ID NO: 54425 - DNA, 34 bp, Homo Sapiens; identical to SEQ ID NO: 13539

SEQ ID NO: 54426 - DNA, 43 bp, Homo Sapiens; identical to SEQ ID NO: 25210

SEQ ID NO: 54427 - DNA, 38 bp, Homo Sapiens; identical to SEQ ID NO: 7865

SEQ ID NO: 54428 - DNA, 27 bp, Homo Sapiens
cagattgtgaatctgacaacagaggct

SEQ ID NO: 54429 - DNA, 32 bp, Homo Sapiens; identical to SEQ ID NO: 18765

SEQ ID NO: 54430 - DNA, 22 bp, Homo Sapiens
cggaagcgtgctgggcccataa

SEQ ID NO: 54431 - DNA, 38 bp, Homo Sapiens; identical to SEQ ID NO: 27471

SEQ ID NO: 54432 - DNA, 42 bp, Homo Sapiens; identical to SEQ ID NO: 28602

SEQ ID NO: 54433 - DNA, 34 bp, Homo Sapiens; identical to SEQ ID NO: 18726

SEQ ID NO: 54434 - DNA, 16 bp, Homo Sapiens
gttcgattcccgggcg

SEQ ID NO: 54435 - DNA, 34 bp, Homo Sapiens; identical to SEQ ID NO: 11951

SEQ ID NO: 54436 - DNA, 36 bp, Homo Sapiens; identical to SEQ ID NO: 2928

SEQ ID NO: 54437 - DNA, 35 bp, Homo Sapiens; identical to SEQ ID NO: 12243

SEQ ID NO: 54438 - DNA, 33 bp, Homo Sapiens; identical to SEQ ID NO: 29548

SEQ ID NO: 54439 - DNA, 45 bp, Homo Sapiens; identical to SEQ ID NO: 12132

SEQ ID NO: 54440 - DNA, 36 bp, Homo Sapiens; identical to SEQ ID NO: 22226

SEQ ID NO: 54441 - DNA, 17 bp, Homo Sapiens
aaaatgttggttatacc

SEQ ID NO: 54442 - DNA, 37 bp, Homo Sapiens; identical to SEQ ID NO: 17052

SEQ ID NO: 54443 - DNA, 20 bp, Homo Sapiens
caggatggccgagcggtcta

SEQ ID NO: 54444 - DNA, 16 bp, Homo Sapiens
gtggtatgattctcgc

SEQ ID NO: 54445 - DNA, 26 bp, Homo Sapiens
gggagaccggggttcgattccccgac

SEQ ID NO: 54446 - DNA, 36 bp, Homo Sapiens; identical to SEQ ID NO: 14223

SEQ ID NO: 54447 - DNA, 37 bp, Homo Sapiens; identical to SEQ ID NO: 16701

SEQ ID NO: 54448 - DNA, 42 bp, Homo Sapiens; identical to SEQ ID NO: 29000

SEQ ID NO: 54449 - DNA, 45 bp, Homo Sapiens; identical to SEQ ID NO: 16227

SEQ ID NO: 54450 - DNA, 38 bp, Homo Sapiens; identical to SEQ ID NO: 28874

SEQ ID NO: 54451 - DNA, 33 bp, Homo Sapiens; identical to SEQ ID NO: 2952

SEQ ID NO: 54452 - DNA, 31 bp, Homo Sapiens; identical to SEQ ID NO: 12560

SEQ ID NO: 54453 - DNA, 36 bp, Homo Sapiens; identical to SEQ ID NO: 27004

SEQ ID NO: 54454 - DNA, 31 bp, Homo Sapiens; identical to SEQ ID NO: 22573

SEQ ID NO: 54455 - DNA, 37 bp, Homo Sapiens; identical to SEQ ID NO: 3146

SEQ ID NO: 54456 - DNA, 38 bp, Homo Sapiens; identical to SEQ ID NO: 7460

SEQ ID NO: 54457 - DNA, 38 bp, Homo Sapiens; identical to SEQ ID NO: 11955

SEQ ID NO: 54458 - DNA, 35 bp, Homo Sapiens; identical to SEQ ID NO: 12227

SEQ ID NO: 54459 - DNA, 39 bp, Homo Sapiens; identical to SEQ ID NO: 1484

SEQ ID NO: 54460 - DNA, 33 bp, Homo Sapiens; identical to SEQ ID NO: 12012

SEQ ID NO: 54461 - DNA, 34 bp, Homo Sapiens; identical to SEQ ID NO: 3172

SEQ ID NO: 54462 - DNA, 41 bp, Homo Sapiens; identical to SEQ ID NO: 23351

SEQ ID NO: 54463 - DNA, 38 bp, Homo Sapiens; identical to SEQ ID NO: 3176

SEQ ID NO: 54464 - DNA, 45 bp, Homo Sapiens; identical to SEQ ID NO: 22619

SEQ ID NO: 54465 - DNA, 34 bp, Homo Sapiens; identical to SEQ ID NO: 13078

SEQ ID NO: 54466 - DNA, 35 bp, Homo Sapiens; identical to SEQ ID NO: 24012

SEQ ID NO: 54467 - DNA, 42 bp, Homo Sapiens; identical to SEQ ID NO: 25712

SEQ ID NO: 54468 - DNA, 33 bp, Homo Sapiens; identical to SEQ ID NO: 5303

SEQ ID NO: 54469 - DNA, 37 bp, Homo Sapiens; identical to SEQ ID NO: 3162

SEQ ID NO: 54470 - DNA, 40 bp, Homo Sapiens; identical to SEQ ID NO: 24860

SEQ ID NO: 54471 - DNA, 39 bp, Homo Sapiens; identical to SEQ ID NO: 3100

SEQ ID NO: 54472 - DNA, 42 bp, Homo Sapiens; identical to SEQ ID NO: 13511

SEQ ID NO: 54473 - DNA, 24 bp, Homo Sapiens
cggatagctcagtcggtagagcat

SEQ ID NO: 54474 - DNA, 42 bp, Homo Sapiens; identical to SEQ ID NO: 29065

SEQ ID NO: 54475 - DNA, 18 bp, Homo Sapiens
aggtcgatggatcgaaac

SEQ ID NO: 54476 - DNA, 23 bp, Homo Sapiens
ctcagtcggtagagcatgagact

SEQ ID NO: 54477 - DNA, 21 bp, Homo Sapiens
tcgattcccggcccatgcacc

SEQ ID NO: 54478 - DNA, 19 bp, Homo Sapiens
cgattctcatagtcctagc

SEQ ID NO: 54479 - DNA, 19 bp, Homo Sapiens
attcccgggcggcgcacca

SEQ ID NO: 54480 - DNA, 35 bp, Homo Sapiens; identical to SEQ ID NO: 17115

SEQ ID NO: 54481 - DNA, 19 bp, Homo Sapiens
cgaaaatgttggttatacc

SEQ ID NO: 54482 - DNA, 16 bp, Homo Sapiens
atggatagcgcattgg

SEQ ID NO: 54483 - DNA, 26 bp, Homo Sapiens
ccgggttcgactcccggtgtgggaac

SEQ ID NO: 54484 - DNA, 32 bp, Homo Sapiens; identical to SEQ ID NO: 11010

SEQ ID NO: 54485 - DNA, 36 bp, Homo Sapiens; identical to SEQ ID NO: 12244

SEQ ID NO: 54486 - DNA, 16 bp, Homo Sapiens
tcccgggcggcgcacc

SEQ ID NO: 54487 - DNA, 30 bp, Homo Sapiens; identical to SEQ ID NO: 31052

SEQ ID NO: 54488 - DNA, 23 bp, Homo Sapiens
ctagtggttaggattcggcgctc

SEQ ID NO: 54489 - DNA, 32 bp, Homo Sapiens; identical to SEQ ID NO: 6210

SEQ ID NO: 54490 - DNA, 32 bp, Homo Sapiens; identical to SEQ ID NO: 11098

SEQ ID NO: 54491 - DNA, 36 bp, Homo Sapiens; identical to SEQ ID NO: 12228

SEQ ID NO: 54492 - DNA, 36 bp, Homo Sapiens; identical to SEQ ID NO: 3161

SEQ ID NO: 54493 - DNA, 28 bp, Homo Sapiens
gagaaagctcacaagaactgctaactca

SEQ ID NO: 54494 - DNA, 32 bp, Homo Sapiens; identical to SEQ ID NO: 30754

SEQ ID NO: 54495 - DNA, 31 bp, Homo Sapiens; identical to SEQ ID NO: 11165

SEQ ID NO: 54496 - DNA, 21 bp, Homo Sapiens
cgatcccgggtttcggcacca

SEQ ID NO: 54497 - DNA, 32 bp, Homo Sapiens; identical to SEQ ID NO: 27988

SEQ ID NO: 54498 - DNA, 32 bp, Homo Sapiens; identical to SEQ ID NO: 29142

SEQ ID NO: 54499 - DNA, 32 bp, Homo Sapiens; identical to SEQ ID NO: 16561

SEQ ID NO: 54500 - DNA, 33 bp, Homo Sapiens; identical to SEQ ID NO: 16835

SEQ ID NO: 54501 - DNA, 21 bp, Homo Sapiens
cgaaaccgggcggaaacacca

SEQ ID NO: 54502 - DNA, 17 bp, Homo Sapiens
cccgggcggaaacacca

SEQ ID NO: 54503 - DNA, 17 bp, Homo Sapiens
tcccggcccatgcacca

SEQ ID NO: 54504 - DNA, 28 bp, Homo Sapiens
cactgtaaagctaacttagcattaacct

SEQ ID NO: 54505 - DNA, 19 bp, Homo Sapiens
caatacttaatttctgcca

SEQ ID NO: 54506 - DNA, 20 bp, Homo Sapiens
cggttaggattcctggtttt

SEQ ID NO: 54507 - DNA, 22 bp, Homo Sapiens
ccaacacctctttacagtgacc

SEQ ID NO: 54508 - DNA, 16 bp, Homo Sapiens
gtagtcgtggccgagt

SEQ ID NO: 54509 - DNA, 18 bp, Homo Sapiens
ttcccggccaatgcacca

SEQ ID NO: 54510 - DNA, 18 bp, Homo Sapiens
ttcccggccaacgcacca

SEQ ID NO: 54511 - DNA, 21 bp, Homo Sapiens
ctagtggttaggattcggcgc

SEQ ID NO: 54512 - DNA, 20 bp, Homo Sapiens
agtggttagtactctgcgtt

SEQ ID NO: 54513 - DNA, 17 bp, Homo Sapiens
tctcgctggggcctcca

SEQ ID NO: 54514 - DNA, 18 bp, Homo Sapiens
ggttagcactctggactc

SEQ ID NO: 54515 - DNA, 18 bp, Homo Sapiens
tggttagtactctgcgtt

SEQ ID NO: 54516 - DNA, 19 bp, Homo Sapiens
tggttagtactctgcgttg

SEQ ID NO: 54517 - DNA, 48 bp, Homo Sapiens; identical to SEQ ID NO: 15503

SEQ ID NO: 54518 - DNA, 48 bp, Homo Sapiens; identical to SEQ ID NO: 3720

SEQ ID NO: 54519 - DNA, 48 bp, Homo Sapiens; identical to SEQ ID NO: 2836

SEQ ID NO: 54520 - DNA, 48 bp, Homo Sapiens; identical to SEQ ID NO: 7156

SEQ ID NO: 54521 - DNA, 48 bp, Homo Sapiens; identical to SEQ ID NO: 8259

SEQ ID NO: 54522 - DNA, 36 bp, Homo Sapiens; identical to SEQ ID NO: 8927

SEQ ID NO: 54523 - DNA, 37 bp, Homo Sapiens; identical to SEQ ID NO: 2889

SEQ ID NO: 54524 - DNA, 48 bp, Homo Sapiens; identical to SEQ ID NO: 8201

SEQ ID NO: 54525 - DNA, 48 bp, Homo Sapiens; identical to SEQ ID NO: 10367

SEQ ID NO: 54526 - DNA, 29 bp, Homo Sapiens
gtcggtagagcatgggactcttaatccca

SEQ ID NO: 54527 - DNA, 33 bp, Homo Sapiens; identical to SEQ ID NO: 21141

SEQ ID NO: 54528 - DNA, 34 bp, Homo Sapiens; identical to SEQ ID NO: 15089

SEQ ID NO: 54529 - DNA, 29 bp, Homo Sapiens
gtcggtagagcatgagactcttaatctca

SEQ ID NO: 54530 - DNA, 34 bp, Homo Sapiens; identical to SEQ ID NO: 27658

SEQ ID NO: 54531 - DNA, 34 bp, Homo Sapiens; identical to SEQ ID NO: 29264

SEQ ID NO: 54532 - DNA, 35 bp, Homo Sapiens; identical to SEQ ID NO: 274

SEQ ID NO: 54533 - DNA, 48 bp, Homo Sapiens; identical to SEQ ID NO: 24993

SEQ ID NO: 54534 - DNA, 34 bp, Homo Sapiens; identical to SEQ ID NO: 27197

SEQ ID NO: 54535 - DNA, 38 bp, Homo Sapiens; identical to SEQ ID NO: 8791

SEQ ID NO: 54536 - DNA, 35 bp, Homo Sapiens; identical to SEQ ID NO: 10673

SEQ ID NO: 54537 - DNA, 31 bp, Homo Sapiens; identical to SEQ ID NO: 10276

SEQ ID NO: 54538 - DNA, 32 bp, Homo Sapiens; identical to SEQ ID NO: 10829

SEQ ID NO: 54539 - DNA, 46 bp, Homo Sapiens; identical to SEQ ID NO: 543

SEQ ID NO: 54540 - DNA, 36 bp, Homo Sapiens; identical to SEQ ID NO: 7250

SEQ ID NO: 54541 - DNA, 48 bp, Homo Sapiens; identical to SEQ ID NO: 3036

SEQ ID NO: 54542 - DNA, 34 bp, Homo Sapiens; identical to SEQ ID NO: 10908

SEQ ID NO: 54543 - DNA, 48 bp, Homo Sapiens; identical to SEQ ID NO: 15058

SEQ ID NO: 54544 - DNA, 46 bp, Homo Sapiens; identical to SEQ ID NO: 58

SEQ ID NO: 54545 - DNA, 48 bp, Homo Sapiens; identical to SEQ ID NO: 24785

SEQ ID NO: 54546 - DNA, 34 bp, Homo Sapiens; identical to SEQ ID NO: 4435

SEQ ID NO: 54547 - DNA, 48 bp, Homo Sapiens; identical to SEQ ID NO: 29231

SEQ ID NO: 54548 - DNA, 34 bp, Homo Sapiens; identical to SEQ ID NO: 18791

SEQ ID NO: 54549 - DNA, 27 bp, Homo Sapiens
agtaagttgcaatacttaatttctgcc

SEQ ID NO: 54550 - DNA, 32 bp, Homo Sapiens; identical to SEQ ID NO: 13255

SEQ ID NO: 54551 - DNA, 34 bp, Homo Sapiens; identical to SEQ ID NO: 273

SEQ ID NO: 54552 - DNA, 48 bp, Homo Sapiens; identical to SEQ ID NO: 30101

SEQ ID NO: 54553 - DNA, 33 bp, Homo Sapiens; identical to SEQ ID NO: 2782

SEQ ID NO: 54554 - DNA, 34 bp, Homo Sapiens; identical to SEQ ID NO: 16880

SEQ ID NO: 54555 - DNA, 33 bp, Homo Sapiens; identical to SEQ ID NO: 16879

SEQ ID NO: 54556 - DNA, 18 bp, Homo Sapiens
aaccgggcagaaacacca

SEQ ID NO: 54557 - DNA, 27 bp, Homo Sapiens
atgggttcgattctcatagtcctagcc

SEQ ID NO: 54558 - DNA, 37 bp, Homo Sapiens; identical to SEQ ID NO: 2311

SEQ ID NO: 54559 - DNA, 33 bp, Homo Sapiens; identical to SEQ ID NO: 24144

SEQ ID NO: 54560 - DNA, 41 bp, Homo Sapiens; identical to SEQ ID NO: 23279

SEQ ID NO: 54561 - DNA, 48 bp, Homo Sapiens; identical to SEQ ID NO: 1967

SEQ ID NO: 54562 - DNA, 36 bp, Homo Sapiens; identical to SEQ ID NO: 30077

SEQ ID NO: 54563 - DNA, 33 bp, Homo Sapiens; identical to SEQ ID NO: 15287

SEQ ID NO: 54564 - DNA, 48 bp, Homo Sapiens; identical to SEQ ID NO: 7997

SEQ ID NO: 54565 - DNA, 30 bp, Homo Sapiens; identical to SEQ ID NO: 2590

SEQ ID NO: 54566 - DNA, 48 bp, Homo Sapiens; identical to SEQ ID NO: 978

SEQ ID NO: 54567 - DNA, 33 bp, Homo Sapiens; identical to SEQ ID NO: 2707

SEQ ID NO: 54568 - DNA, 35 bp, Homo Sapiens; identical to SEQ ID NO: 8926

SEQ ID NO: 54569 - DNA, 29 bp, Homo Sapiens
aacagaggcttacgaccccttatttaccc

SEQ ID NO: 54570 - DNA, 32 bp, Homo Sapiens; identical to SEQ ID NO: 21140

SEQ ID NO: 54571 - DNA, 31 bp, Homo Sapiens; identical to SEQ ID NO: 16238

SEQ ID NO: 54572 - DNA, 38 bp, Homo Sapiens; identical to SEQ ID NO: 20914

SEQ ID NO: 54573 - DNA, 45 bp, Homo Sapiens; identical to SEQ ID NO: 8798

SEQ ID NO: 54574 - DNA, 31 bp, Homo Sapiens; identical to SEQ ID NO: 747

SEQ ID NO: 54575 - DNA, 28 bp, Homo Sapiens
gatgggttcgattctcatagtcctagcc

SEQ ID NO: 54576 - DNA, 32 bp, Homo Sapiens; identical to SEQ ID NO: 23654

SEQ ID NO: 54577 - DNA, 40 bp, Homo Sapiens; identical to SEQ ID NO: 22230

SEQ ID NO: 54578 - DNA, 31 bp, Homo Sapiens; identical to SEQ ID NO: 15486

SEQ ID NO: 54579 - DNA, 48 bp, Homo Sapiens; identical to SEQ ID NO: 23915

SEQ ID NO: 54580 - DNA, 41 bp, Homo Sapiens; identical to SEQ ID NO: 13897

SEQ ID NO: 54581 - DNA, 18 bp, Homo Sapiens
tggttatcacgtctgctt

SEQ ID NO: 54582 - DNA, 37 bp, Homo Sapiens; identical to SEQ ID NO: 13206

SEQ ID NO: 54583 - DNA, 26 bp, Homo Sapiens
tgcaggttcgagtcctgccgcggtcg

SEQ ID NO: 54584 - DNA, 37 bp, Homo Sapiens; identical to SEQ ID NO: 22497

SEQ ID NO: 54585 - DNA, 48 bp, Homo Sapiens; identical to SEQ ID NO: 1020

SEQ ID NO: 54586 - DNA, 37 bp, Homo Sapiens; identical to SEQ ID NO: 26409

SEQ ID NO: 54587 - DNA, 40 bp, Homo Sapiens; identical to SEQ ID NO: 10736

SEQ ID NO: 54588 - DNA, 31 bp, Homo Sapiens; identical to SEQ ID NO: 131

SEQ ID NO: 54589 - DNA, 45 bp, Homo Sapiens; identical to SEQ ID NO: 14160

SEQ ID NO: 54590 - DNA, 42 bp, Homo Sapiens; identical to SEQ ID NO: 9544

SEQ ID NO: 54591 - DNA, 32 bp, Homo Sapiens; identical to SEQ ID NO: 14910

SEQ ID NO: 54592 - DNA, 33 bp, Homo Sapiens; identical to SEQ ID NO: 11073

SEQ ID NO: 54593 - DNA, 35 bp, Homo Sapiens; identical to SEQ ID NO: 28919

SEQ ID NO: 54594 - DNA, 41 bp, Homo Sapiens; identical to SEQ ID NO: 31016

SEQ ID NO: 54595 - DNA, 48 bp, Homo Sapiens; identical to SEQ ID NO: 23967

SEQ ID NO: 54596 - DNA, 48 bp, Homo Sapiens; identical to SEQ ID NO: 23932

SEQ ID NO: 54597 - DNA, 31 bp, Homo Sapiens; identical to SEQ ID NO: 17568

SEQ ID NO: 54598 - DNA, 34 bp, Homo Sapiens; identical to SEQ ID NO: 30584

SEQ ID NO: 54599 - DNA, 48 bp, Homo Sapiens; identical to SEQ ID NO: 26979

SEQ ID NO: 54600 - DNA, 40 bp, Homo Sapiens; identical to SEQ ID NO: 25685

SEQ ID NO: 54601 - DNA, 31 bp, Homo Sapiens; identical to SEQ ID NO: 17920

SEQ ID NO: 54602 - DNA, 25 bp, Homo Sapiens
gagatgaaaacctttttccaaggac

SEQ ID NO: 54603 - DNA, 28 bp, Homo Sapiens
atgggttcgattctcatagtcctagcca

SEQ ID NO: 54604 - DNA, 26 bp, Homo Sapiens
ccgggttcgattcccgggcggcgcac

SEQ ID NO: 54605 - DNA, 48 bp, Homo Sapiens; identical to SEQ ID NO: 4619

SEQ ID NO: 54606 - DNA, 34 bp, Homo Sapiens; identical to SEQ ID NO: 18767

SEQ ID NO: 54607 - DNA, 26 bp, Homo Sapiens
agaaagctcacaagaactgctaactc

SEQ ID NO: 54608 - DNA, 26 bp, Homo Sapiens
tttgacaacattcaaaaaagagtacc

SEQ ID NO: 54609 - DNA, 32 bp, Homo Sapiens; identical to SEQ ID NO: 10481

SEQ ID NO: 54610 - DNA, 28 bp, Homo Sapiens
gtccgcgtgggttcgaaccccactcctg

SEQ ID NO: 54611 - DNA, 31 bp, Homo Sapiens; identical to SEQ ID NO: 4233

SEQ ID NO: 54612 - DNA, 48 bp, Homo Sapiens; identical to SEQ ID NO: 8496

SEQ ID NO: 54613 - DNA, 30 bp, Homo Sapiens; identical to SEQ ID NO: 3839

SEQ ID NO: 54614 - DNA, 48 bp, Homo Sapiens; identical to SEQ ID NO: 1823

SEQ ID NO: 54615 - DNA, 31 bp, Homo Sapiens; identical to SEQ ID NO: 10570

SEQ ID NO: 54616 - DNA, 36 bp, Homo Sapiens; identical to SEQ ID NO: 9299

SEQ ID NO: 54617 - DNA, 48 bp, Homo Sapiens; identical to SEQ ID NO: 11026

SEQ ID NO: 54618 - DNA, 43 bp, Homo Sapiens; identical to SEQ ID NO: 28652

SEQ ID NO: 54619 - DNA, 48 bp, Homo Sapiens; identical to SEQ ID NO: 1961

SEQ ID NO: 54620 - DNA, 48 bp, Homo Sapiens; identical to SEQ ID NO: 30128

SEQ ID NO: 54621 - DNA, 34 bp, Homo Sapiens; identical to SEQ ID NO: 10672

SEQ ID NO: 54622 - DNA, 31 bp, Homo Sapiens; identical to SEQ ID NO: 15332

SEQ ID NO: 54623 - DNA, 31 bp, Homo Sapiens; identical to SEQ ID NO: 2978

SEQ ID NO: 54624 - DNA, 21 bp, Homo Sapiens
agagtaaataataggagctta

SEQ ID NO: 54625 - DNA, 21 bp, Homo Sapiens
agcgcattggacttctaattc

SEQ ID NO: 54626 - DNA, 31 bp, Homo Sapiens; identical to SEQ ID NO: 2705

SEQ ID NO: 54627 - DNA, 18 bp, Homo Sapiens
aactgggcggaaacacca

SEQ ID NO: 54628 - DNA, 30 bp, Homo Sapiens; identical to SEQ ID NO: 4474

SEQ ID NO: 54629 - DNA, 37 bp, Homo Sapiens; identical to SEQ ID NO: 2795

SEQ ID NO: 54630 - DNA, 32 bp, Homo Sapiens; identical to SEQ ID NO: 415

SEQ ID NO: 54631 - DNA, 23 bp, Homo Sapiens
agtctcataatctgaaggtcgtg

SEQ ID NO: 54632 - DNA, 43 bp, Homo Sapiens; identical to SEQ ID NO: 7621

SEQ ID NO: 54633 - DNA, 34 bp, Homo Sapiens; identical to SEQ ID NO: 771

SEQ ID NO: 54634 - DNA, 33 bp, Homo Sapiens; identical to SEQ ID NO: 18221

SEQ ID NO: 54635 - DNA, 48 bp, Homo Sapiens; identical to SEQ ID NO: 16655

SEQ ID NO: 54636 - DNA, 32 bp, Homo Sapiens; identical to SEQ ID NO: 21185

SEQ ID NO: 54637 - DNA, 39 bp, Homo Sapiens; identical to SEQ ID NO: 7909

SEQ ID NO: 54638 - DNA, 18 bp, Homo Sapiens
aaccgagcggaaacacca

SEQ ID NO: 54639 - DNA, 34 bp, Homo Sapiens; identical to SEQ ID NO: 15079

SEQ ID NO: 54640 - DNA, 30 bp, Homo Sapiens; identical to SEQ ID NO: 5865

SEQ ID NO: 54641 - DNA, 39 bp, Homo Sapiens; identical to SEQ ID NO: 17118

SEQ ID NO: 54642 - DNA, 37 bp, Homo Sapiens; identical to SEQ ID NO: 2042

SEQ ID NO: 54643 - DNA, 48 bp, Homo Sapiens; identical to SEQ ID NO: 6485

SEQ ID NO: 54644 - DNA, 48 bp, Homo Sapiens; identical to SEQ ID NO: 28392

SEQ ID NO: 54645 - DNA, 26 bp, Homo Sapiens
agaggcttacgaccccttatttaccc

SEQ ID NO: 54646 - DNA, 48 bp, Homo Sapiens; identical to SEQ ID NO: 3091

SEQ ID NO: 54647 - DNA, 45 bp, Homo Sapiens; identical to SEQ ID NO: 20165

SEQ ID NO: 54648 - DNA, 48 bp, Homo Sapiens; identical to SEQ ID NO: 16576

SEQ ID NO: 54649 - DNA, 34 bp, Homo Sapiens; identical to SEQ ID NO: 20815

SEQ ID NO: 54650 - DNA, 29 bp, Homo Sapiens
ctccctggtggtctagtggttaggattcg

SEQ ID NO: 54651 - DNA, 42 bp, Homo Sapiens; identical to SEQ ID NO: 11550

SEQ ID NO: 54652 - DNA, 31 bp, Homo Sapiens; identical to SEQ ID NO: 10815

SEQ ID NO: 54653 - DNA, 37 bp, Homo Sapiens; identical to SEQ ID NO: 6717

SEQ ID NO: 54654 - DNA, 34 bp, Homo Sapiens; identical to SEQ ID NO: 19196

SEQ ID NO: 54655 - DNA, 35 bp, Homo Sapiens; identical to SEQ ID NO: 8131

SEQ ID NO: 54656 - DNA, 48 bp, Homo Sapiens; identical to SEQ ID NO: 8801

SEQ ID NO: 54657 - DNA, 34 bp, Homo Sapiens; identical to SEQ ID NO: 8787

SEQ ID NO: 54658 - DNA, 44 bp, Homo Sapiens; identical to SEQ ID NO: 11532

SEQ ID NO: 54659 - DNA, 33 bp, Homo Sapiens; identical to SEQ ID NO: 14966

SEQ ID NO: 54660 - DNA, 48 bp, Homo Sapiens; identical to SEQ ID NO: 9894

SEQ ID NO: 54661 - DNA, 46 bp, Homo Sapiens; identical to SEQ ID NO: 7746

SEQ ID NO: 54662 - DNA, 18 bp, Homo Sapiens
gtcccggcagagatgcca

SEQ ID NO: 54663 - DNA, 18 bp, Homo Sapiens
aaaccggagatgaaaacc

SEQ ID NO: 54664 - DNA, 48 bp, Homo Sapiens; identical to SEQ ID NO: 7748

SEQ ID NO: 54665 - DNA, 17 bp, Homo Sapiens
ctggttcgattccggct

SEQ ID NO: 54666 - DNA, 46 bp, Homo Sapiens; identical to SEQ ID NO: 2803

SEQ ID NO: 54667 - DNA, 30 bp, Homo Sapiens; identical to SEQ ID NO: 25643

SEQ ID NO: 54668 - DNA, 33 bp, Homo Sapiens; identical to SEQ ID NO: 4645

SEQ ID NO: 54669 - DNA, 42 bp, Homo Sapiens; identical to SEQ ID NO: 26330

SEQ ID NO: 54670 - DNA, 35 bp, Homo Sapiens; identical to SEQ ID NO: 7424

SEQ ID NO: 54671 - DNA, 42 bp, Homo Sapiens; identical to SEQ ID NO: 14975

SEQ ID NO: 54672 - DNA, 45 bp, Homo Sapiens; identical to SEQ ID NO: 12307

SEQ ID NO: 54673 - DNA, 25 bp, Homo Sapiens
ccccgcgcaggttcgaatcctgccg

SEQ ID NO: 54674 - DNA, 34 bp, Homo Sapiens; identical to SEQ ID NO: 21187

SEQ ID NO: 54675 - DNA, 46 bp, Homo Sapiens; identical to SEQ ID NO: 4928

SEQ ID NO: 54676 - DNA, 41 bp, Homo Sapiens; identical to SEQ ID NO: 8794

SEQ ID NO: 54677 - DNA, 36 bp, Homo Sapiens; identical to SEQ ID NO: 4000

SEQ ID NO: 54678 - DNA, 35 bp, Homo Sapiens; identical to SEQ ID NO: 30464

SEQ ID NO: 54679 - DNA, 33 bp, Homo Sapiens; identical to SEQ ID NO: 26525

SEQ ID NO: 54680 - DNA, 28 bp, Homo Sapiens
gttttgacaacattcaaaaaagagtacc

SEQ ID NO: 54681 - DNA, 31 bp, Homo Sapiens; identical to SEQ ID NO: 5004

SEQ ID NO: 54682 - DNA, 36 bp, Homo Sapiens; identical to SEQ ID NO: 6656

SEQ ID NO: 54683 - DNA, 38 bp, Homo Sapiens; identical to SEQ ID NO: 7812

SEQ ID NO: 54684 - DNA, 44 bp, Homo Sapiens; identical to SEQ ID NO: 14399

SEQ ID NO: 54685 - DNA, 38 bp, Homo Sapiens; identical to SEQ ID NO: 8357

SEQ ID NO: 54686 - DNA, 48 bp, Homo Sapiens; identical to SEQ ID NO: 19948

SEQ ID NO: 54687 - DNA, 31 bp, Homo Sapiens; identical to SEQ ID NO: 25127

SEQ ID NO: 54688 - DNA, 48 bp, Homo Sapiens; identical to SEQ ID NO: 21736

SEQ ID NO: 54689 - DNA, 30 bp, Homo Sapiens; identical to SEQ ID NO: 25109

SEQ ID NO: 54690 - DNA, 34 bp, Homo Sapiens; identical to SEQ ID NO: 12000

SEQ ID NO: 54691 - DNA, 39 bp, Homo Sapiens; identical to SEQ ID NO: 30353

SEQ ID NO: 54692 - DNA, 29 bp, Homo Sapiens
gtggtagaattctcgcctgccacgcggga

SEQ ID NO: 54693 - DNA, 17 bp, Homo Sapiens
aactgggcggaaacacc

SEQ ID NO: 54694 - DNA, 24 bp, Homo Sapiens
agcgtgctgggcccataacccaga

SEQ ID NO: 54695 - DNA, 26 bp, Homo Sapiens
aaggctgcgtgttcgaatcacgtcgg

SEQ ID NO: 54696 - DNA, 42 bp, Homo Sapiens; identical to SEQ ID NO: 25542

SEQ ID NO: 54697 - DNA, 33 bp, Homo Sapiens; identical to SEQ ID NO: 1052

SEQ ID NO: 54698 - DNA, 45 bp, Homo Sapiens; identical to SEQ ID NO: 57

SEQ ID NO: 54699 - DNA, 34 bp, Homo Sapiens; identical to SEQ ID NO: 23053

SEQ ID NO: 54700 - DNA, 46 bp, Homo Sapiens; identical to SEQ ID NO: 27701

SEQ ID NO: 54701 - DNA, 30 bp, Homo Sapiens; identical to SEQ ID NO: 7630

SEQ ID NO: 54702 - DNA, 34 bp, Homo Sapiens; identical to SEQ ID NO: 16184

SEQ ID NO: 54703 - DNA, 30 bp, Homo Sapiens; identical to SEQ ID NO: 20796

SEQ ID NO: 54704 - DNA, 34 bp, Homo Sapiens; identical to SEQ ID NO: 4780

SEQ ID NO: 54705 - DNA, 41 bp, Homo Sapiens; identical to SEQ ID NO: 4159

SEQ ID NO: 54706 - DNA, 17 bp, Homo Sapiens
aaccgggcagaaacacc

SEQ ID NO: 54707 - DNA, 37 bp, Homo Sapiens; identical to SEQ ID NO: 398

SEQ ID NO: 54708 - DNA, 29 bp, Homo Sapiens
ttggtctaggggtatgattctcgctttgg

SEQ ID NO: 54709 - DNA, 17 bp, Homo Sapiens
ttcccggccagggaacc

SEQ ID NO: 54710 - DNA, 34 bp, Homo Sapiens; identical to SEQ ID NO: 8925

SEQ ID NO: 54711 - DNA, 32 bp, Homo Sapiens; identical to SEQ ID NO: 10582

SEQ ID NO: 54712 - DNA, 32 bp, Homo Sapiens; identical to SEQ ID NO: 15286

SEQ ID NO: 54713 - DNA, 32 bp, Homo Sapiens; identical to SEQ ID NO: 13378

SEQ ID NO: 54714 - DNA, 48 bp, Homo Sapiens; identical to SEQ ID NO: 848

SEQ ID NO: 54715 - DNA, 32 bp, Homo Sapiens; identical to SEQ ID NO: 8617

SEQ ID NO: 54716 - DNA, 28 bp, Homo Sapiens
agaaagctcacaagaactgctaactcat

SEQ ID NO: 54717 - DNA, 30 bp, Homo Sapiens; identical to SEQ ID NO: 18538

SEQ ID NO: 54718 - DNA, 44 bp, Homo Sapiens; identical to SEQ ID NO: 8797

SEQ ID NO: 54719 - DNA, 34 bp, Homo Sapiens; identical to SEQ ID NO: 25300

SEQ ID NO: 54720 - DNA, 26 bp, Homo Sapiens
ccagggttcaagtccctgttcaggcg

SEQ ID NO: 54721 - DNA, 30 bp, Homo Sapiens; identical to SEQ ID NO: 10503

SEQ ID NO: 54722 - DNA, 48 bp, Homo Sapiens
atccattggggtttccccgcgcaggttcgaatcctgccgactacgcca

SEQ ID NO: 54723 - DNA, 37 bp, Homo Sapiens; identical to SEQ ID NO: 6215

SEQ ID NO: 54724 - DNA, 46 bp, Homo Sapiens; identical to SEQ ID NO: 19946

SEQ ID NO: 54725 - DNA, 28 bp, Homo Sapiens
ttttgacaacattcaaaaaagagtacca

SEQ ID NO: 54726 - DNA, 38 bp, Homo Sapiens; identical to SEQ ID NO: 3115

SEQ ID NO: 54727 - DNA, 32 bp, Homo Sapiens; identical to SEQ ID NO: 8806

SEQ ID NO: 54728 - DNA, 17 bp, Homo Sapiens
agttctggtctccggat

SEQ ID NO: 54729 - DNA, 47 bp, Homo Sapiens; identical to SEQ ID NO: 8235

SEQ ID NO: 54730 - DNA, 35 bp, Homo Sapiens; identical to SEQ ID NO: 29550

SEQ ID NO: 54731 - DNA, 17 bp, Homo Sapiens
aaccgagcggaaacacc

SEQ ID NO: 54732 - DNA, 39 bp, Homo Sapiens; identical to SEQ ID NO: 14693

SEQ ID NO: 54733 - DNA, 44 bp, Homo Sapiens; identical to SEQ ID NO: 22552

SEQ ID NO: 54734 - DNA, 33 bp, Homo Sapiens; identical to SEQ ID NO: 10496

SEQ ID NO: 54735 - DNA, 46 bp, Homo Sapiens; identical to SEQ ID NO: 17021

SEQ ID NO: 54736 - DNA, 34 bp, Homo Sapiens; identical to SEQ ID NO: 9708

SEQ ID NO: 54737 - DNA, 31 bp, Homo Sapiens; identical to SEQ ID NO: 15076

SEQ ID NO: 54738 - DNA, 31 bp, Homo Sapiens; identical to SEQ ID NO: 7037

SEQ ID NO: 54739 - DNA, 26 bp, Homo Sapiens
cggtagagcatgggactcttaatccc

SEQ ID NO: 54740 - DNA, 28 bp, Homo Sapiens
cgttaacttccaattaactagttttgac

SEQ ID NO: 54741 - DNA, 48 bp, Homo Sapiens; identical to SEQ ID NO: 22979

SEQ ID NO: 54742 - DNA, 43 bp, Homo Sapiens; identical to SEQ ID NO: 1550

SEQ ID NO: 54743 - DNA, 46 bp, Homo Sapiens; identical to SEQ ID NO: 23097

SEQ ID NO: 54744 - DNA, 27 bp, Homo Sapiens
aatgttggttatacccttcccgtacta

SEQ ID NO: 54745 - DNA, 31 bp, Homo Sapiens; identical to SEQ ID NO: 3827

SEQ ID NO: 54746 - DNA, 31 bp, Homo Sapiens; identical to SEQ ID NO: 22605

SEQ ID NO: 54747 - DNA, 33 bp, Homo Sapiens; identical to SEQ ID NO: 29168

SEQ ID NO: 54748 - DNA, 37 bp, Homo Sapiens; identical to SEQ ID NO: 7426

SEQ ID NO: 54749 - DNA, 39 bp, Homo Sapiens; identical to SEQ ID NO: 11188

SEQ ID NO: 54750 - DNA, 34 bp, Homo Sapiens; identical to SEQ ID NO: 25424

SEQ ID NO: 54751 - DNA, 31 bp, Homo Sapiens; identical to SEQ ID NO: 14878

SEQ ID NO: 54752 - DNA, 48 bp, Homo Sapiens; identical to SEQ ID NO: 2491

SEQ ID NO: 54753 - DNA, 32 bp, Homo Sapiens; identical to SEQ ID NO: 26542

SEQ ID NO: 54754 - DNA, 37 bp, Homo Sapiens; identical to SEQ ID NO: 24900

SEQ ID NO: 54755 - DNA, 40 bp, Homo Sapiens; identical to SEQ ID NO: 26752

SEQ ID NO: 54756 - DNA, 29 bp, Homo Sapiens
cccaggcggcccgggttcgactcccggtg

SEQ ID NO: 54757 - DNA, 48 bp, Homo Sapiens; identical to SEQ ID NO: 1245

SEQ ID NO: 54758 - DNA, 29 bp, Homo Sapiens
caacagaggcttacgaccccttatttacc

SEQ ID NO: 54759 - DNA, 38 bp, Homo Sapiens; identical to SEQ ID NO: 30362

SEQ ID NO: 54760 - DNA, 48 bp, Homo Sapiens; identical to SEQ ID NO: 9730

SEQ ID NO: 54761 - DNA, 31 bp, Homo Sapiens; identical to SEQ ID NO: 1853

SEQ ID NO: 54762 - DNA, 21 bp, Homo Sapiens
tctcataatctgaaggtcgtg

SEQ ID NO: 54763 - DNA, 33 bp, Homo Sapiens; identical to SEQ ID NO: 19195

SEQ ID NO: 54764 - DNA, 39 bp, Homo Sapiens; identical to SEQ ID NO: 5421

SEQ ID NO: 54765 - DNA, 42 bp, Homo Sapiens; identical to SEQ ID NO: 16485

SEQ ID NO: 54766 - DNA, 23 bp, Homo Sapiens
gttcgagtcccacctggggtgcc

SEQ ID NO: 54767 - DNA, 33 bp, Homo Sapiens; identical to SEQ ID NO: 23457

SEQ ID NO: 54768 - DNA, 31 bp, Homo Sapiens; identical to SEQ ID NO: 17725

SEQ ID NO: 54769 - DNA, 32 bp, Homo Sapiens; identical to SEQ ID NO: 6370

SEQ ID NO: 54770 - DNA, 27 bp, Homo Sapiens
cagctttggggggttcgattccttcct

SEQ ID NO: 54771 - DNA, 36 bp, Homo Sapiens; identical to SEQ ID NO: 24964

SEQ ID NO: 54772 - DNA, 44 bp, Homo Sapiens; identical to SEQ ID NO: 21494

SEQ ID NO: 54773 - DNA, 34 bp, Homo Sapiens; identical to SEQ ID NO: 29549

SEQ ID NO: 54774 - DNA, 48 bp, Homo Sapiens; identical to SEQ ID NO: 6415

SEQ ID NO: 54775 - DNA, 32 bp, Homo Sapiens; identical to SEQ ID NO: 17569

SEQ ID NO: 54776 - DNA, 34 bp, Homo Sapiens; identical to SEQ ID NO: 14368

SEQ ID NO: 54777 - DNA, 41 bp, Homo Sapiens; identical to SEQ ID NO: 21061

SEQ ID NO: 54778 - DNA, 18 bp, Homo Sapiens
tcggtagagcatgagacc

SEQ ID NO: 54779 - DNA, 41 bp, Homo Sapiens; identical to SEQ ID NO: 2455

SEQ ID NO: 54780 - DNA, 25 bp, Homo Sapiens
ttagaatcttagctttgggtgctaa

SEQ ID NO: 54781 - DNA, 41 bp, Homo Sapiens; identical to SEQ ID NO: 20626

SEQ ID NO: 54782 - DNA, 32 bp, Homo Sapiens; identical to SEQ ID NO: 9679

SEQ ID NO: 54783 - DNA, 35 bp, Homo Sapiens; identical to SEQ ID NO: 12001

SEQ ID NO: 54784 - DNA, 19 bp, Homo Sapiens
gattcccgggcggcgcacc

SEQ ID NO: 54785 - DNA, 35 bp, Homo Sapiens; identical to SEQ ID NO: 14369

SEQ ID NO: 54786 - DNA, 17 bp, Homo Sapiens
gcagcgatggccgagtg

SEQ ID NO: 54787 - DNA, 43 bp, Homo Sapiens; identical to SEQ ID NO: 28347

SEQ ID NO: 54788 - DNA, 39 bp, Homo Sapiens; identical to SEQ ID NO: 16062

SEQ ID NO: 54789 - DNA, 31 bp, Homo Sapiens; identical to SEQ ID NO: 30294

SEQ ID NO: 54790 - DNA, 39 bp, Homo Sapiens; identical to SEQ ID NO: 6035

SEQ ID NO: 54791 - DNA, 44 bp, Homo Sapiens; identical to SEQ ID NO: 20164

SEQ ID NO: 54792 - DNA, 24 bp, Homo Sapiens
tccgaggtgattttcatattgaat

SEQ ID NO: 54793 - DNA, 46 bp, Homo Sapiens; identical to SEQ ID NO: 29176

SEQ ID NO: 54794 - DNA, 48 bp, Homo Sapiens; identical to SEQ ID NO: 7292

SEQ ID NO: 54795 - DNA, 35 bp, Homo Sapiens; identical to SEQ ID NO: 10988

SEQ ID NO: 54796 - DNA, 24 bp, Homo Sapiens
cccattcttgcgacccgggttcga

SEQ ID NO: 54797 - DNA, 40 bp, Homo Sapiens; identical to SEQ ID NO: 25305

SEQ ID NO: 54798 - DNA, 48 bp, Homo Sapiens; identical to SEQ ID NO: 10752

SEQ ID NO: 54799 - DNA, 26 bp, Homo Sapiens
agtcggtagagcatgagacccttaat

SEQ ID NO: 54800 - DNA, 40 bp, Homo Sapiens; identical to SEQ ID NO: 19702

SEQ ID NO: 54801 - DNA, 35 bp, Homo Sapiens; identical to SEQ ID NO: 8027

SEQ ID NO: 54802 - DNA, 44 bp, Homo Sapiens; identical to SEQ ID NO: 7693

SEQ ID NO: 54803 - DNA, 18 bp, Homo Sapiens
ttcgattcccggccaacg

SEQ ID NO: 54804 - DNA, 24 bp, Homo Sapiens
tccaggttcgactcctggctggct

SEQ ID NO: 54805 - DNA, 36 bp, Homo Sapiens; identical to SEQ ID NO: 16666

SEQ ID NO: 54806 - DNA, 20 bp, Homo Sapiens
caattcctcttcttaacacc

SEQ ID NO: 54807 - DNA, 36 bp, Homo Sapiens; identical to SEQ ID NO: 4716

SEQ ID NO: 54808 - DNA, 38 bp, Homo Sapiens; identical to SEQ ID NO: 16176

SEQ ID NO: 54809 - DNA, 43 bp, Homo Sapiens; identical to SEQ ID NO: 15425

SEQ ID NO: 54810 - DNA, 35 bp, Homo Sapiens; identical to SEQ ID NO: 22476

SEQ ID NO: 54811 - DNA, 42 bp, Homo Sapiens; identical to SEQ ID NO: 30984

SEQ ID NO: 54812 - DNA, 34 bp, Homo Sapiens; identical to SEQ ID NO: 17216

SEQ ID NO: 54813 - DNA, 35 bp, Homo Sapiens; identical to SEQ ID NO: 19221

SEQ ID NO: 54814 - DNA, 28 bp, Homo Sapiens
ggcgctctcaccgccgcggcccgggttc

SEQ ID NO: 54815 - DNA, 32 bp, Homo Sapiens; identical to SEQ ID NO: 7775

SEQ ID NO: 54816 - DNA, 48 bp, Homo Sapiens; identical to SEQ ID NO: 7580

SEQ ID NO: 54817 - DNA, 36 bp, Homo Sapiens; identical to SEQ ID NO: 26428

SEQ ID NO: 54818 - DNA, 34 bp, Homo Sapiens; identical to SEQ ID NO: 21799

SEQ ID NO: 54819 - DNA, 22 bp, Homo Sapiens
tcagttggtagagcatcagact

SEQ ID NO: 54820 - DNA, 22 bp, Homo Sapiens
gacttaagatccaatggacata

SEQ ID NO: 54821 - DNA, 16 bp, Homo Sapiens
cgattcccggccaacg

SEQ ID NO: 54822 - DNA, 33 bp, Homo Sapiens; identical to SEQ ID NO: 3238

SEQ ID NO: 54823 - DNA, 27 bp, Homo Sapiens
cataaaacttaaaactttacagtcaga

SEQ ID NO: 54824 - DNA, 16 bp, Homo Sapiens
cacgcgggagaccggg

SEQ ID NO: 54825 - DNA, 16 bp, Homo Sapiens
cataatctgaaggtcg

SEQ ID NO: 54826 - DNA, 44 bp, Homo Sapiens; identical to SEQ ID NO: 22002

SEQ ID NO: 54827 - DNA, 31 bp, Homo Sapiens; identical to SEQ ID NO: 18539

SEQ ID NO: 54828 - DNA, 32 bp, Homo Sapiens; identical to SEQ ID NO: 1540

SEQ ID NO: 54829 - DNA, 35 bp, Homo Sapiens; identical to SEQ ID NO: 28571

SEQ ID NO: 54830 - DNA, 33 bp, Homo Sapiens; identical to SEQ ID NO: 7166

SEQ ID NO: 54831 - DNA, 48 bp, Homo Sapiens; identical to SEQ ID NO: 16071

SEQ ID NO: 54832 - DNA, 33 bp, Homo Sapiens; identical to SEQ ID NO: 13751

SEQ ID NO: 54833 - DNA, 40 bp, Homo Sapiens; identical to SEQ ID NO: 25916

SEQ ID NO: 54834 - DNA, 48 bp, Homo Sapiens; identical to SEQ ID NO: 4702

SEQ ID NO: 54835 - DNA, 25 bp, Homo Sapiens
ttggtgcaactccaaataaaagtac

SEQ ID NO: 54836 - DNA, 36 bp, Homo Sapiens; identical to SEQ ID NO: 10748

SEQ ID NO: 54837 - DNA, 45 bp, Homo Sapiens; identical to SEQ ID NO: 21545

SEQ ID NO: 54838 - DNA, 33 bp, Homo Sapiens; identical to SEQ ID NO: 28596

SEQ ID NO: 54839 - DNA, 40 bp, Homo Sapiens; identical to SEQ ID NO: 21196

SEQ ID NO: 54840 - DNA, 33 bp, Homo Sapiens; identical to SEQ ID NO: 18417

SEQ ID NO: 54841 - DNA, 36 bp, Homo Sapiens; identical to SEQ ID NO: 6797

SEQ ID NO: 54842 - DNA, 26 bp, Homo Sapiens
cgtgagttcgagcctcacacggggca

SEQ ID NO: 54843 - DNA, 48 bp, Homo Sapiens; identical to SEQ ID NO: 11909

SEQ ID NO: 54844 - DNA, 39 bp, Homo Sapiens; identical to SEQ ID NO: 18109

SEQ ID NO: 54845 - DNA, 48 bp, Homo Sapiens; identical to SEQ ID NO: 23640

SEQ ID NO: 54846 - DNA, 37 bp, Homo Sapiens; identical to SEQ ID NO: 26829

SEQ ID NO: 54847 - DNA, 28 bp, Homo Sapiens
ggtccagggttcaagtccctgttcgggc

SEQ ID NO: 54848 - DNA, 44 bp, Homo Sapiens; identical to SEQ ID NO: 10204

SEQ ID NO: 54849 - DNA, 46 bp, Homo Sapiens; identical to SEQ ID NO: 8234

SEQ ID NO: 54850 - DNA, 25 bp, Homo Sapiens
tagaattctcgcctgccacgcggga

SEQ ID NO: 54851 - DNA, 38 bp, Homo Sapiens; identical to SEQ ID NO: 19223

SEQ ID NO: 54852 - DNA, 23 bp, Homo Sapiens
cggcccgggttcgactcccggtg

SEQ ID NO: 54853 - DNA, 26 bp, Homo Sapiens
aggtggcccgggttcgactcccggta

SEQ ID NO: 54854 - DNA, 48 bp, Homo Sapiens; identical to SEQ ID NO: 7509

SEQ ID NO: 54855 - DNA, 33 bp, Homo Sapiens; identical to SEQ ID NO: 4660

SEQ ID NO: 54856 - DNA, 16 bp, Homo Sapiens
ttcggcgctctcaccg

SEQ ID NO: 54857 - DNA, 26 bp, Homo Sapiens
tttgatagagtaaataataggagctt

SEQ ID NO: 54858 - DNA, 32 bp, Homo Sapiens; identical to SEQ ID NO: 12597

SEQ ID NO: 54859 - DNA, 27 bp, Homo Sapiens
gtgtagtggttatcacgtctgctttac

SEQ ID NO: 54860 - DNA, 17 bp, Homo Sapiens
cgcgggttcgatccccg

SEQ ID NO: 54861 - DNA, 47 bp, Homo Sapiens; identical to SEQ ID NO: 3056

SEQ ID NO: 54862 - DNA, 33 bp, Homo Sapiens; identical to SEQ ID NO: 8308

SEQ ID NO: 54863 - DNA, 36 bp, Homo Sapiens; identical to SEQ ID NO: 10144

SEQ ID NO: 54864 - DNA, 41 bp, Homo Sapiens; identical to SEQ ID NO: 21569

SEQ ID NO: 54865 - DNA, 37 bp, Homo Sapiens; identical to SEQ ID NO: 14563

SEQ ID NO: 54866 - DNA, 42 bp, Homo Sapiens; identical to SEQ ID NO: 11530

SEQ ID NO: 54867 - DNA, 36 bp, Homo Sapiens; identical to SEQ ID NO: 17283

SEQ ID NO: 54868 - DNA, 39 bp, Homo Sapiens; identical to SEQ ID NO: 25164

SEQ ID NO: 54869 - DNA, 32 bp, Homo Sapiens; identical to SEQ ID NO: 16878

SEQ ID NO: 54870 - DNA, 43 bp, Homo Sapiens; identical to SEQ ID NO: 16845

SEQ ID NO: 54871 - DNA, 27 bp, Homo Sapiens
gaaagctcacaagaactgctaactcat

SEQ ID NO: 54872 - DNA, 34 bp, Homo Sapiens; identical to SEQ ID NO: 13705

SEQ ID NO: 54873 - DNA, 33 bp, Homo Sapiens; identical to SEQ ID NO: 27100

SEQ ID NO: 54874 - DNA, 44 bp, Homo Sapiens; identical to SEQ ID NO: 28044

SEQ ID NO: 54875 - DNA, 48 bp, Homo Sapiens; identical to SEQ ID NO: 2026

SEQ ID NO: 54876 - DNA, 29 bp, Homo Sapiens
acaggagatcctgggttcgaatcccagcg

SEQ ID NO: 54877 - DNA, 40 bp, Homo Sapiens; identical to SEQ ID NO: 25616

SEQ ID NO: 54878 - DNA, 33 bp, Homo Sapiens; identical to SEQ ID NO: 30192

SEQ ID NO: 54879 - DNA, 48 bp, Homo Sapiens; identical to SEQ ID NO: 14568

SEQ ID NO: 54880 - DNA, 21 bp, Homo Sapiens
cttaagatccaatggacatat

SEQ ID NO: 54881 - DNA, 37 bp, Homo Sapiens; identical to SEQ ID NO: 647

SEQ ID NO: 54882 - DNA, 39 bp, Homo Sapiens; identical to SEQ ID NO: 3083

SEQ ID NO: 54883 - DNA, 18 bp, Homo Sapiens
ccaagcagttgacccggg

SEQ ID NO: 54884 - DNA, 48 bp, Homo Sapiens; identical to SEQ ID NO: 3634

SEQ ID NO: 54885 - DNA, 34 bp, Homo Sapiens; identical to SEQ ID NO: 16913

SEQ ID NO: 54886 - DNA, 35 bp, Homo Sapiens; identical to SEQ ID NO: 23040

SEQ ID NO: 54887 - DNA, 30 bp, Homo Sapiens; identical to SEQ ID NO: 15773

SEQ ID NO: 54888 - DNA, 33 bp, Homo Sapiens; identical to SEQ ID NO: 23909

SEQ ID NO: 54889 - DNA, 40 bp, Homo Sapiens; identical to SEQ ID NO: 20621

SEQ ID NO: 54890 - DNA, 33 bp, Homo Sapiens; identical to SEQ ID NO: 13202

SEQ ID NO: 54891 - DNA, 32 bp, Homo Sapiens; identical to SEQ ID NO: 25128

SEQ ID NO: 54892 - DNA, 42 bp, Homo Sapiens; identical to SEQ ID NO: 25918

SEQ ID NO: 54893 - DNA, 48 bp, Homo Sapiens; identical to SEQ ID NO: 13480

SEQ ID NO: 54894 - DNA, 40 bp, Homo Sapiens; identical to SEQ ID NO: 28499

SEQ ID NO: 54895 - DNA, 38 bp, Homo Sapiens; identical to SEQ ID NO: 12098

SEQ ID NO: 54896 - DNA, 28 bp, Homo Sapiens
agtcggtagagcatgagacccttaatct

SEQ ID NO: 54897 - DNA, 25 bp, Homo Sapiens
gagttcaaatctcgctggggcctcc

SEQ ID NO: 54898 - DNA, 35 bp, Homo Sapiens; identical to SEQ ID NO: 23054

SEQ ID NO: 54899 - DNA, 45 bp, Homo Sapiens; identical to SEQ ID NO: 15427

SEQ ID NO: 54900 - DNA, 48 bp, Homo Sapiens; identical to SEQ ID NO: 22200

SEQ ID NO: 54901 - DNA, 43 bp, Homo Sapiens; identical to SEQ ID NO: 17586

SEQ ID NO: 54902 - DNA, 29 bp, Homo Sapiens
agcgatccgagttcaaatctcggtggaac

SEQ ID NO: 54903 - DNA, 23 bp, Homo Sapiens
ttaagatggcagagcccggtaat

SEQ ID NO: 54904 - DNA, 39 bp, Homo Sapiens; identical to SEQ ID NO: 13177

SEQ ID NO: 54905 - DNA, 38 bp, Homo Sapiens; identical to SEQ ID NO: 23348

SEQ ID NO: 54906 - DNA, 48 bp, Homo Sapiens; identical to SEQ ID NO: 545

SEQ ID NO: 54907 - DNA, 31 bp, Homo Sapiens; identical to SEQ ID NO: 13601

SEQ ID NO: 54908 - DNA, 34 bp, Homo Sapiens; identical to SEQ ID NO: 6230

SEQ ID NO: 54909 - DNA, 37 bp, Homo Sapiens; identical to SEQ ID NO: 2770

SEQ ID NO: 54910 - DNA, 28 bp, Homo Sapiens
aacagaggcttacgaccccttatttacc

SEQ ID NO: 54911 - DNA, 48 bp, Homo Sapiens; identical to SEQ ID NO: 18364

SEQ ID NO: 54912 - DNA, 31 bp, Homo Sapiens; identical to SEQ ID NO: 28341

SEQ ID NO: 54913 - DNA, 22 bp, Homo Sapiens
ttcgaatccggctcggaggacc

SEQ ID NO: 54914 - DNA, 37 bp, Homo Sapiens; identical to SEQ ID NO: 8387

SEQ ID NO: 54915 - DNA, 34 bp, Homo Sapiens; identical to SEQ ID NO: 8039

SEQ ID NO: 54916 - DNA, 38 bp, Homo Sapiens; identical to SEQ ID NO: 9196

SEQ ID NO: 54917 - DNA, 37 bp, Homo Sapiens; identical to SEQ ID NO: 21409

SEQ ID NO: 54918 - DNA, 33 bp, Homo Sapiens; identical to SEQ ID NO: 15078

SEQ ID NO: 54919 - DNA, 41 bp, Homo Sapiens; identical to SEQ ID NO: 22936

SEQ ID NO: 54920 - DNA, 24 bp, Homo Sapiens
acaacagaggcttacgacccctta

SEQ ID NO: 54921 - DNA, 48 bp, Homo Sapiens; identical to SEQ ID NO: 30477

SEQ ID NO: 54922 - DNA, 39 bp, Homo Sapiens; identical to SEQ ID NO: 3182

SEQ ID NO: 54923 - DNA, 40 bp, Homo Sapiens; identical to SEQ ID NO: 1023

SEQ ID NO: 54924 - DNA, 22 bp, Homo Sapiens
gtggttatcacatctgctttac

SEQ ID NO: 54925 - DNA, 37 bp, Homo Sapiens; identical to SEQ ID NO: 16932

SEQ ID NO: 54926 - DNA, 23 bp, Homo Sapiens
ctcagtcggtagagcatgagacc

SEQ ID NO: 54927 - DNA, 48 bp, Homo Sapiens; identical to SEQ ID NO: 6383

SEQ ID NO: 54928 - DNA, 44 bp, Homo Sapiens; identical to SEQ ID NO: 2136

SEQ ID NO: 54929 - DNA, 42 bp, Homo Sapiens; identical to SEQ ID NO: 17025

SEQ ID NO: 54930 - DNA, 46 bp, Homo Sapiens; identical to SEQ ID NO: 4104

SEQ ID NO: 54931 - DNA, 27 bp, Homo Sapiens
gcagcttcaaacctgccggggcttcca

SEQ ID NO: 54932 - DNA, 27 bp, Homo Sapiens
cctcgttagtatagtggttagtatccc

SEQ ID NO: 54933 - DNA, 45 bp, Homo Sapiens; identical to SEQ ID NO: 2458

SEQ ID NO: 54934 - DNA, 25 bp, Homo Sapiens
taacgccaaggtcgcgggttcgaac

SEQ ID NO: 54935 - DNA, 16 bp, Homo Sapiens
cgcccggctagctcag

SEQ ID NO: 54936 - DNA, 32 bp, Homo Sapiens; identical to SEQ ID NO: 25111

SEQ ID NO: 54937 - DNA, 29 bp, Homo Sapiens
ttggtggtgcagtggtagaattctcgcct

SEQ ID NO: 54938 - DNA, 48 bp, Homo Sapiens; identical to SEQ ID NO: 9548

SEQ ID NO: 54939 - DNA, 24 bp, Homo Sapiens
cagtctcataatctgaaggtcgtg

SEQ ID NO: 54940 - DNA, 39 bp, Homo Sapiens; identical to SEQ ID NO: 20817

SEQ ID NO: 54941 - DNA, 40 bp, Homo Sapiens; identical to SEQ ID NO: 10749

SEQ ID NO: 54942 - DNA, 43 bp, Homo Sapiens; identical to SEQ ID NO: 28443

SEQ ID NO: 54943 - DNA, 48 bp, Homo Sapiens; identical to SEQ ID NO: 13764

SEQ ID NO: 54944 - DNA, 37 bp, Homo Sapiens; identical to SEQ ID NO: 7569

SEQ ID NO: 54945 - DNA, 33 bp, Homo Sapiens; identical to SEQ ID NO: 29187

SEQ ID NO: 54946 - DNA, 40 bp, Homo Sapiens; identical to SEQ ID NO: 20160

SEQ ID NO: 54947 - DNA, 25 bp, Homo Sapiens
gctcagtcggtagagcatgagaccc

SEQ ID NO: 54948 - DNA, 30 bp, Homo Sapiens; identical to SEQ ID NO: 23456

SEQ ID NO: 54949 - DNA, 31 bp, Homo Sapiens; identical to SEQ ID NO: 4805

SEQ ID NO: 54950 - DNA, 31 bp, Homo Sapiens; identical to SEQ ID NO: 13047

SEQ ID NO: 54951 - DNA, 24 bp, Homo Sapiens
tcggtagagcatgagacccttaat

SEQ ID NO: 54952 - DNA, 33 bp, Homo Sapiens; identical to SEQ ID NO: 19576

SEQ ID NO: 54953 - DNA, 33 bp, Homo Sapiens; identical to SEQ ID NO: 20206

SEQ ID NO: 54954 - DNA, 19 bp, Homo Sapiens
cgattcccggccaacgcac

SEQ ID NO: 54955 - DNA, 46 bp, Homo Sapiens; identical to SEQ ID NO: 10036

SEQ ID NO: 54956 - DNA, 42 bp, Homo Sapiens; identical to SEQ ID NO: 21062

SEQ ID NO: 54957 - DNA, 40 bp, Homo Sapiens; identical to SEQ ID NO: 15200

SEQ ID NO: 54958 - DNA, 25 bp, Homo Sapiens
tggtggagttaaagactttttctct

SEQ ID NO: 54959 - DNA, 25 bp, Homo Sapiens
tagtaccgttaacttccaattaact

SEQ ID NO: 54960 - DNA, 32 bp, Homo Sapiens; identical to SEQ ID NO: 1423

SEQ ID NO: 54961 - DNA, 27 bp, Homo Sapiens
ttggtggttcgatcccacccagggacg

SEQ ID NO: 54962 - DNA, 29 bp, Homo Sapiens
cgcgggagaccggggttcaattccccgac

SEQ ID NO: 54963 - DNA, 33 bp, Homo Sapiens; identical to SEQ ID NO: 4184

SEQ ID NO: 54964 - DNA, 25 bp, Homo Sapiens
tggctaggattcggcgctttcaccg

SEQ ID NO: 54965 - DNA, 19 bp, Homo Sapiens
gttcgactcccagtggggc

SEQ ID NO: 54966 - DNA, 45 bp, Homo Sapiens; identical to SEQ ID NO: 28053

SEQ ID NO: 54967 - DNA, 28 bp, Homo Sapiens
aatgttggttatacccttcccgtactac

SEQ ID NO: 54968 - DNA, 39 bp, Homo Sapiens; identical to SEQ ID NO: 10651

SEQ ID NO: 54969 - DNA, 31 bp, Homo Sapiens; identical to SEQ ID NO: 26642

SEQ ID NO: 54970 - DNA, 46 bp, Homo Sapiens; identical to SEQ ID NO: 22941

SEQ ID NO: 54971 - DNA, 33 bp, Homo Sapiens; identical to SEQ ID NO: 2572

SEQ ID NO: 54972 - DNA, 40 bp, Homo Sapiens; identical to SEQ ID NO: 30469

SEQ ID NO: 54973 - DNA, 35 bp, Homo Sapiens; identical to SEQ ID NO: 14393

SEQ ID NO: 54974 - DNA, 30 bp, Homo Sapiens; identical to SEQ ID NO: 18082

SEQ ID NO: 54975 - DNA, 30 bp, Homo Sapiens; identical to SEQ ID NO: 16867

SEQ ID NO: 54976 - DNA, 27 bp, Homo Sapiens
cttacctcctcaaagcaatacactgaa

SEQ ID NO: 54977 - DNA, 35 bp, Homo Sapiens; identical to SEQ ID NO: 28871

SEQ ID NO: 54978 - DNA, 29 bp, Homo Sapiens
tacactgaaaatgtttagacgggctcaca

SEQ ID NO: 54979 - DNA, 44 bp, Homo Sapiens; identical to SEQ ID NO: 17121

SEQ ID NO: 54980 - DNA, 23 bp, Homo Sapiens
tcggtagagcatgggactcttaa

SEQ ID NO: 54981 - DNA, 33 bp, Homo Sapiens; identical to SEQ ID NO: 4383

SEQ ID NO: 54982 - DNA, 29 bp, Homo Sapiens
agagcccggtaatcgcataaaacttaaaa

SEQ ID NO: 54983 - DNA, 48 bp, Homo Sapiens; identical to SEQ ID NO: 29337

SEQ ID NO: 54984 - DNA, 40 bp, Homo Sapiens; identical to SEQ ID NO: 20625

SEQ ID NO: 54985 - DNA, 38 bp, Homo Sapiens; identical to SEQ ID NO: 13731

SEQ ID NO: 54986 - DNA, 48 bp, Homo Sapiens; identical to SEQ ID NO: 15008

SEQ ID NO: 54987 - DNA, 21 bp, Homo Sapiens
aaccggagatgaaaacctttt

SEQ ID NO: 54988 - DNA, 21 bp, Homo Sapiens
cagtcggtagagcataagact

SEQ ID NO: 54989 - DNA, 41 bp, Homo Sapiens; identical to SEQ ID NO: 11549

SEQ ID NO: 54990 - DNA, 40 bp, Homo Sapiens; identical to SEQ ID NO: 29730

SEQ ID NO: 54991 - DNA, 30 bp, Homo Sapiens; identical to SEQ ID NO: 8406

SEQ ID NO: 54992 - DNA, 25 bp, Homo Sapiens
tttccgtagtgtagcggttatcaca

SEQ ID NO: 54993 - DNA, 22 bp, Homo Sapiens
aaagacaggggttaggcctctt

SEQ ID NO: 54994 - DNA, 39 bp, Homo Sapiens; identical to SEQ ID NO: 13185

SEQ ID NO: 54995 - DNA, 33 bp, Homo Sapiens; identical to SEQ ID NO: 18529

SEQ ID NO: 54996 - DNA, 32 bp, Homo Sapiens; identical to SEQ ID NO: 4659

SEQ ID NO: 54997 - DNA, 31 bp, Homo Sapiens; identical to SEQ ID NO: 9565

SEQ ID NO: 54998 - DNA, 33 bp, Homo Sapiens; identical to SEQ ID NO: 1306

SEQ ID NO: 54999 - DNA, 30 bp, Homo Sapiens; identical to SEQ ID NO: 30647

SEQ ID NO: 55000 - DNA, 27 bp, Homo Sapiens
tcctgagttcgagcctcagagagggca

SEQ ID NO: 55001 - DNA, 48 bp, Homo Sapiens; identical to SEQ ID NO: 29125

SEQ ID NO: 55002 - DNA, 31 bp, Homo Sapiens; identical to SEQ ID NO: 15255

SEQ ID NO: 55003 - DNA, 48 bp, Homo Sapiens; identical to SEQ ID NO: 16967

SEQ ID NO: 55004 - DNA, 26 bp, Homo Sapiens
taaaccaggggtcgcgagttcaaatc

SEQ ID NO: 55005 - DNA, 35 bp, Homo Sapiens; identical to SEQ ID NO: 2871

SEQ ID NO: 55006 - DNA, 34 bp, Homo Sapiens; identical to SEQ ID NO: 27243

SEQ ID NO: 55007 - DNA, 29 bp, Homo Sapiens
attctcgcctgccacgcgggaggcccggg

SEQ ID NO: 55008 - DNA, 35 bp, Homo Sapiens; identical to SEQ ID NO: 24953

SEQ ID NO: 55009 - DNA, 36 bp, Homo Sapiens; identical to SEQ ID NO: 6344

SEQ ID NO: 55010 - DNA, 16 bp, Homo Sapiens
tttccgtagtgtagcg

SEQ ID NO: 55011 - DNA, 41 bp, Homo Sapiens; identical to SEQ ID NO: 14374

SEQ ID NO: 55012 - DNA, 24 bp, Homo Sapiens
ttgacccgggttcgattcccggcc

SEQ ID NO: 55013 - DNA, 38 bp, Homo Sapiens; identical to SEQ ID NO: 31188

SEQ ID NO: 55014 - DNA, 34 bp, Homo Sapiens; identical to SEQ ID NO: 8564

SEQ ID NO: 55015 - DNA, 17 bp, Homo Sapiens
cgtcaggatggccgagc

SEQ ID NO: 55016 - DNA, 32 bp, Homo Sapiens; identical to SEQ ID NO: 25184

SEQ ID NO: 55017 - DNA, 44 bp, Homo Sapiens; identical to SEQ ID NO: 13369

SEQ ID NO: 55018 - DNA, 27 bp, Homo Sapiens
cagtcggtagagcatgagacccttaat

SEQ ID NO: 55019 - DNA, 19 bp, Homo Sapiens
aggcttacgaccccttatt

SEQ ID NO: 55020 - DNA, 18 bp, Homo Sapiens
ctcagggatgggttcgat

SEQ ID NO: 55021 - DNA, 26 bp, Homo Sapiens
cgcgggagaccggggttcaattcccc

SEQ ID NO: 55022 - DNA, 28 bp, Homo Sapiens
ttaacttccaattaactagttttgacaa

SEQ ID NO: 55023 - DNA, 21 bp, Homo Sapiens
tgtagtcgtggccgagtggtt

SEQ ID NO: 55024 - DNA, 48 bp, Homo Sapiens; identical to SEQ ID NO: 222

SEQ ID NO: 55025 - DNA, 48 bp, Homo Sapiens; identical to SEQ ID NO: 10739

SEQ ID NO: 55026 - DNA, 48 bp, Homo Sapiens; identical to SEQ ID NO: 29305

SEQ ID NO: 55027 - DNA, 27 bp, Homo Sapiens
tgaatccagcgatccgagttcgagtct

SEQ ID NO: 55028 - DNA, 42 bp, Homo Sapiens; identical to SEQ ID NO: 29008

SEQ ID NO: 55029 - DNA, 35 bp, Homo Sapiens; identical to SEQ ID NO: 24904

SEQ ID NO: 55030 - DNA, 48 bp, Homo Sapiens; identical to SEQ ID NO: 998

SEQ ID NO: 55031 - DNA, 16 bp, Homo Sapiens
gatccttaggtcgctg

SEQ ID NO: 55032 - DNA, 37 bp, Homo Sapiens; identical to SEQ ID NO: 24085

SEQ ID NO: 55033 - DNA, 34 bp, Homo Sapiens; identical to SEQ ID NO: 24592

SEQ ID NO: 55034 - DNA, 16 bp, Homo Sapiens
aatcccaccgctgcca

SEQ ID NO: 55035 - DNA, 48 bp, Homo Sapiens; identical to SEQ ID NO: 6628

SEQ ID NO: 55036 - DNA, 35 bp, Homo Sapiens; identical to SEQ ID NO: 25357

SEQ ID NO: 55037 - DNA, 24 bp, Homo Sapiens
taggattcctggttttcacccagg

SEQ ID NO: 55038 - DNA, 26 bp, Homo Sapiens
tgaaaatgtttagacgggctcacatc

SEQ ID NO: 55039 - DNA, 37 bp, Homo Sapiens; identical to SEQ ID NO: 18089

SEQ ID NO: 55040 - DNA, 31 bp, Homo Sapiens; identical to SEQ ID NO: 2621

SEQ ID NO: 55041 - DNA, 28 bp, Homo Sapiens
gtagcttacctcctcaaagcaatacact

SEQ ID NO: 55042 - DNA, 39 bp, Homo Sapiens; identical to SEQ ID NO: 14373

SEQ ID NO: 55043 - DNA, 24 bp, Homo Sapiens
taagttgcaatacttaatttctgc

SEQ ID NO: 55044 - DNA, 30 bp, Homo Sapiens; identical to SEQ ID NO: 12052

SEQ ID NO: 55045 - DNA, 19 bp, Homo Sapiens
agtggttaaggcgttggac

SEQ ID NO: 55046 - DNA, 48 bp, Homo Sapiens; identical to SEQ ID NO: 26362

SEQ ID NO: 55047 - DNA, 35 bp, Homo Sapiens; identical to SEQ ID NO: 14411

SEQ ID NO: 55048 - DNA, 27 bp, Homo Sapiens
tagtggttatcacgttcgcctcacacg

SEQ ID NO: 55049 - DNA, 48 bp, Homo Sapiens; identical to SEQ ID NO: 25718

SEQ ID NO: 55050 - DNA, 48 bp, Homo Sapiens; identical to SEQ ID NO: 12321

SEQ ID NO: 55051 - DNA, 28 bp, Homo Sapiens
acgcgggagaccggggttcgattccccg

SEQ ID NO: 55052 - DNA, 28 bp, Homo Sapiens
tcccgggttcgatccccagcatctccac

SEQ ID NO: 55053 - DNA, 34 bp, Homo Sapiens; identical to SEQ ID NO: 28804

SEQ ID NO: 55054 - DNA, 42 bp, Homo Sapiens; identical to SEQ ID NO: 24990

SEQ ID NO: 55055 - DNA, 30 bp, Homo Sapiens; identical to SEQ ID NO: 20531

SEQ ID NO: 55056 - DNA, 48 bp, Homo Sapiens; identical to SEQ ID NO: 12371

SEQ ID NO: 55057 - DNA, 48 bp, Homo Sapiens; identical to SEQ ID NO: 11606

SEQ ID NO: 55058 - DNA, 42 bp, Homo Sapiens; identical to SEQ ID NO: 13423

SEQ ID NO: 55059 - DNA, 46 bp, Homo Sapiens; identical to SEQ ID NO: 1288

SEQ ID NO: 55060 - DNA, 23 bp, Homo Sapiens
acacgcgaaaggtccccggttcg

SEQ ID NO: 55061 - DNA, 41 bp, Homo Sapiens; identical to SEQ ID NO: 9223

SEQ ID NO: 55062 - DNA, 17 bp, Homo Sapiens
aaccctgctcgctgcgc

SEQ ID NO: 55063 - DNA, 29 bp, Homo Sapiens
gctctcaccgccgcggcccgggttcgatt

SEQ ID NO: 55064 - DNA, 44 bp, Homo Sapiens; identical to SEQ ID NO: 15465

SEQ ID NO: 55065 - DNA, 28 bp, Homo Sapiens
gcagttgacccgggttcgattcccggcc

SEQ ID NO: 55066 - DNA, 48 bp, Homo Sapiens; identical to SEQ ID NO: 30397

SEQ ID NO: 55067 - DNA, 29 bp, Homo Sapiens
gctgggcccataacccagaggtcgatgga

SEQ ID NO: 55068 - DNA, 24 bp, Homo Sapiens
aacagaggcttacgaccccttatt

SEQ ID NO: 55069 - DNA, 33 bp, Homo Sapiens; identical to SEQ ID NO: 29376

SEQ ID NO: 55070 - DNA, 25 bp, Homo Sapiens
atcctgggttcgaatcccagcggtg

SEQ ID NO: 55071 - DNA, 17 bp, Homo Sapiens
cgcgggttcgaaccccg

SEQ ID NO: 55072 - DNA, 21 bp, Homo Sapiens
cagtcggtggagcatgggact

SEQ ID NO: 55073 - DNA, 37 bp, Homo Sapiens; identical to SEQ ID NO: 5442

SEQ ID NO: 55074 - DNA, 46 bp, Homo Sapiens; identical to SEQ ID NO: 14566

SEQ ID NO: 55075 - DNA, 39 bp, Homo Sapiens; identical to SEQ ID NO: 22579

SEQ ID NO: 55076 - DNA, 48 bp, Homo Sapiens; identical to SEQ ID NO: 22238

SEQ ID NO: 55077 - DNA, 47 bp, Homo Sapiens; identical to SEQ ID NO: 29124

SEQ ID NO: 55078 - DNA, 37 bp, Homo Sapiens; identical to SEQ ID NO: 10835

SEQ ID NO: 55079 - DNA, 33 bp, Homo Sapiens; identical to SEQ ID NO: 24447

SEQ ID NO: 55080 - DNA, 36 bp, Homo Sapiens; identical to SEQ ID NO: 6784

SEQ ID NO: 55081 - DNA, 48 bp, Homo Sapiens; identical to SEQ ID NO: 14981

SEQ ID NO: 55082 - DNA, 29 bp, Homo Sapiens
cataatctgaaggtcgtgagttcgagcct

SEQ ID NO: 55083 - DNA, 17 bp, Homo Sapiens
ttcgaatccgagtcacg

SEQ ID NO: 55084 - DNA, 33 bp, Homo Sapiens; identical to SEQ ID NO: 21970

SEQ ID NO: 55085 - DNA, 38 bp, Homo Sapiens; identical to SEQ ID NO: 7403

SEQ ID NO: 55086 - DNA, 28 bp, Homo Sapiens
tccagggttcaagtccctgttcaggcgc

SEQ ID NO: 55087 - DNA, 26 bp, Homo Sapiens
catatgtccgcgtgggttcgaacccc

SEQ ID NO: 55088 - DNA, 33 bp, Homo Sapiens; identical to SEQ ID NO: 23655

SEQ ID NO: 55089 - DNA, 33 bp, Homo Sapiens; identical to SEQ ID NO: 23722

SEQ ID NO: 55090 - DNA, 31 bp, Homo Sapiens; identical to SEQ ID NO: 15203

SEQ ID NO: 55091 - DNA, 36 bp, Homo Sapiens; identical to SEQ ID NO: 4924

SEQ ID NO: 55092 - DNA, 37 bp, Homo Sapiens; identical to SEQ ID NO: 420

SEQ ID NO: 55093 - DNA, 28 bp, Homo Sapiens
cgcgggaggcccgggttcgattcccggc

SEQ ID NO: 55094 - DNA, 38 bp, Homo Sapiens; identical to SEQ ID NO: 11948

SEQ ID NO: 55095 - DNA, 33 bp, Homo Sapiens; identical to SEQ ID NO: 14409

SEQ ID NO: 55096 - DNA, 48 bp, Homo Sapiens; identical to SEQ ID NO: 3325

SEQ ID NO: 55097 - DNA, 32 bp, Homo Sapiens; identical to SEQ ID NO: 17143

SEQ ID NO: 55098 - DNA, 48 bp, Homo Sapiens; identical to SEQ ID NO: 59

SEQ ID NO: 55099 - DNA, 36 bp, Homo Sapiens; identical to SEQ ID NO: 20623

SEQ ID NO: 55100 - DNA, 32 bp, Homo Sapiens; identical to SEQ ID NO: 16529

SEQ ID NO: 55101 - DNA, 16 bp, Homo Sapiens
gggagaccggggttcg

SEQ ID NO: 55102 - DNA, 31 bp, Homo Sapiens; identical to SEQ ID NO: 15196

SEQ ID NO: 55103 - DNA, 34 bp, Homo Sapiens; identical to SEQ ID NO: 4263

SEQ ID NO: 55104 - DNA, 32 bp, Homo Sapiens; identical to SEQ ID NO: 10725

SEQ ID NO: 55105 - DNA, 27 bp, Homo Sapiens
tacactgaaaatgtttagacgggctca

SEQ ID NO: 55106 - DNA, 30 bp, Homo Sapiens; identical to SEQ ID NO: 9228

SEQ ID NO: 55107 - DNA, 48 bp, Homo Sapiens; identical to SEQ ID NO: 1555

SEQ ID NO: 55108 - DNA, 41 bp, Homo Sapiens; identical to SEQ ID NO: 20161

SEQ ID NO: 55109 - DNA, 19 bp, Homo Sapiens
tctcagggatgggttcgat

SEQ ID NO: 55110 - DNA, 20 bp, Homo Sapiens
tcgaaaccgggcagaagcac

SEQ ID NO: 55111 - DNA, 48 bp, Homo Sapiens; identical to SEQ ID NO: 8079

SEQ ID NO: 55112 - DNA, 48 bp, Homo Sapiens; identical to SEQ ID NO: 28863

SEQ ID NO: 55113 - DNA, 31 bp, Homo Sapiens; identical to SEQ ID NO: 9949

SEQ ID NO: 55114 - DNA, 37 bp, Homo Sapiens; identical to SEQ ID NO: 16382

SEQ ID NO: 55115 - DNA, 24 bp, Homo Sapiens
aaccggagatgaaaacctttttcc

SEQ ID NO: 55116 - DNA, 22 bp, Homo Sapiens
ttaaatacagaccaagagcctt

SEQ ID NO: 55117 - DNA, 16 bp, Homo Sapiens
cagcgatccgagttcg

SEQ ID NO: 55118 - DNA, 48 bp, Homo Sapiens; identical to SEQ ID NO: 22254

SEQ ID NO: 55119 - DNA, 32 bp, Homo Sapiens; identical to SEQ ID NO: 17841

SEQ ID NO: 55120 - DNA, 31 bp, Homo Sapiens; identical to SEQ ID NO: 1050

SEQ ID NO: 55121 - DNA, 46 bp, Homo Sapiens; identical to SEQ ID NO: 13307

SEQ ID NO: 55122 - DNA, 32 bp, Homo Sapiens; identical to SEQ ID NO: 8562

SEQ ID NO: 55123 - DNA, 31 bp, Homo Sapiens; identical to SEQ ID NO: 18101

SEQ ID NO: 55124 - DNA, 29 bp, Homo Sapiens
agcactctggactttgaatccagcgatcc

SEQ ID NO: 55125 - DNA, 22 bp, Homo Sapiens
ccctcagtaagttgcaatactt

SEQ ID NO: 55126 - DNA, 43 bp, Homo Sapiens; identical to SEQ ID NO: 8796

SEQ ID NO: 55127 - DNA, 18 bp, Homo Sapiens
cgaaaaagtcatggaggc

SEQ ID NO: 55128 - DNA, 48 bp, Homo Sapiens; identical to SEQ ID NO: 8654

SEQ ID NO: 55129 - DNA, 28 bp, Homo Sapiens
ggttaggattcggcgctctcaccgccgc

SEQ ID NO: 55130 - DNA, 48 bp, Homo Sapiens; identical to SEQ ID NO: 12483

SEQ ID NO: 55131 - DNA, 39 bp, Homo Sapiens; identical to SEQ ID NO: 26817

SEQ ID NO: 55132 - DNA, 17 bp, Homo Sapiens
gccccgggttcgatccc

SEQ ID NO: 55133 - DNA, 16 bp, Homo Sapiens
accgagcggaaacacc

SEQ ID NO: 55134 - DNA, 39 bp, Homo Sapiens; identical to SEQ ID NO: 20159

SEQ ID NO: 55135 - DNA, 30 bp, Homo Sapiens; identical to SEQ ID NO: 26320

SEQ ID NO: 55136 - DNA, 22 bp, Homo Sapiens
gggattagctcaaatggtagag

SEQ ID NO: 55137 - DNA, 33 bp, Homo Sapiens; identical to SEQ ID NO: 9500

SEQ ID NO: 55138 - DNA, 32 bp, Homo Sapiens; identical to SEQ ID NO: 15801

SEQ ID NO: 55139 - DNA, 31 bp, Homo Sapiens; identical to SEQ ID NO: 8938

SEQ ID NO: 55140 - DNA, 33 bp, Homo Sapiens; identical to SEQ ID NO: 30347

SEQ ID NO: 55141 - DNA, 35 bp, Homo Sapiens; identical to SEQ ID NO: 16405

SEQ ID NO: 55142 - DNA, 36 bp, Homo Sapiens; identical to SEQ ID NO: 11445

SEQ ID NO: 55143 - DNA, 28 bp, Homo Sapiens
tcagtggtagaattctcgcctgccacgc

SEQ ID NO: 55144 - DNA, 33 bp, Homo Sapiens; identical to SEQ ID NO: 6349

SEQ ID NO: 55145 - DNA, 41 bp, Homo Sapiens; identical to SEQ ID NO: 28215

SEQ ID NO: 55146 - DNA, 28 bp, Homo Sapiens
cgggagaccggggttcaattccccgacg

SEQ ID NO: 55147 - DNA, 34 bp, Homo Sapiens; identical to SEQ ID NO: 25596

SEQ ID NO: 55148 - DNA, 25 bp, Homo Sapiens
agtcggtagagcatgagacccttaa

SEQ ID NO: 55149 - DNA, 46 bp, Homo Sapiens; identical to SEQ ID NO: 17899

SEQ ID NO: 55150 - DNA, 48 bp, Homo Sapiens; identical to SEQ ID NO: 1889

SEQ ID NO: 55151 - DNA, 30 bp, Homo Sapiens; identical to SEQ ID NO: 3304

SEQ ID NO: 55152 - DNA, 48 bp, Homo Sapiens; identical to SEQ ID NO: 14547

SEQ ID NO: 55153 - DNA, 24 bp, Homo Sapiens
tcgtaaaccgaagatcgcgggttc

SEQ ID NO: 55154 - DNA, 27 bp, Homo Sapiens
caggtggcccgggttcgactcccggta

SEQ ID NO: 55155 - DNA, 48 bp, Homo Sapiens; identical to SEQ ID NO: 18379

SEQ ID NO: 55156 - DNA, 35 bp, Homo Sapiens; identical to SEQ ID NO: 1481

SEQ ID NO: 55157 - DNA, 25 bp, Homo Sapiens
gtggtagaattctcgcctgccacgc

SEQ ID NO: 55158 - DNA, 44 bp, Homo Sapiens; identical to SEQ ID NO: 28389

SEQ ID NO: 55159 - DNA, 38 bp, Homo Sapiens; identical to SEQ ID NO: 16162

SEQ ID NO: 55160 - DNA, 29 bp, Homo Sapiens
ccgtagtggagtggttatcacgttcgcct

SEQ ID NO: 55161 - DNA, 28 bp, Homo Sapiens
agtcggtagagcatgggactcttaatct

SEQ ID NO: 55162 - DNA, 29 bp, Homo Sapiens
gaaggctgcgtgttcgaatcacgtcgggg

SEQ ID NO: 55163 - DNA, 48 bp, Homo Sapiens; identical to SEQ ID NO: 30047

SEQ ID NO: 55164 - DNA, 28 bp, Homo Sapiens
cgtgggttcgaatcccaccctcgtcgcc

SEQ ID NO: 55165 - DNA, 44 bp, Homo Sapiens; identical to SEQ ID NO: 28348

SEQ ID NO: 55166 - DNA, 48 bp, Homo Sapiens; identical to SEQ ID NO: 11342

SEQ ID NO: 55167 - DNA, 48 bp, Homo Sapiens; identical to SEQ ID NO: 18318

SEQ ID NO: 55168 - DNA, 47 bp, Homo Sapiens; identical to SEQ ID NO: 17155

SEQ ID NO: 55169 - DNA, 35 bp, Homo Sapiens; identical to SEQ ID NO: 24059

SEQ ID NO: 55170 - DNA, 37 bp, Homo Sapiens; identical to SEQ ID NO: 12903

SEQ ID NO: 55171 - DNA, 48 bp, Homo Sapiens; identical to SEQ ID NO: 13921

SEQ ID NO: 55172 - DNA, 38 bp, Homo Sapiens; identical to SEQ ID NO: 13878

SEQ ID NO: 55173 - DNA, 27 bp, Homo Sapiens
aggcatcagcctccggagctggggatt

SEQ ID NO: 55174 - DNA, 37 bp, Homo Sapiens; identical to SEQ ID NO: 20631

SEQ ID NO: 55175 - DNA, 26 bp, Homo Sapiens
taatggtggagttaaagactttttct

SEQ ID NO: 55176 - DNA, 32 bp, Homo Sapiens; identical to SEQ ID NO: 23721

SEQ ID NO: 55177 - DNA, 29 bp, Homo Sapiens
ggattcctggttttcacccaggcggcccg

SEQ ID NO: 55178 - DNA, 48 bp, Homo Sapiens; identical to SEQ ID NO: 17689

SEQ ID NO: 55179 - DNA, 30 bp, Homo Sapiens; identical to SEQ ID NO: 16394

SEQ ID NO: 55180 - DNA, 42 bp, Homo Sapiens; identical to SEQ ID NO: 10751

SEQ ID NO: 55181 - DNA, 27 bp, Homo Sapiens
agcttacctcctcaaagcaatacactg

SEQ ID NO: 55182 - DNA, 31 bp, Homo Sapiens; identical to SEQ ID NO: 3523

SEQ ID NO: 55183 - DNA, 33 bp, Homo Sapiens; identical to SEQ ID NO: 8819

SEQ ID NO: 55184 - DNA, 37 bp, Homo Sapiens; identical to SEQ ID NO: 911

SEQ ID NO: 55185 - DNA, 48 bp, Homo Sapiens; identical to SEQ ID NO: 10680

SEQ ID NO: 55186 - DNA, 19 bp, Homo Sapiens
taaataataggagcttaaa

SEQ ID NO: 55187 - DNA, 30 bp, Homo Sapiens; identical to SEQ ID NO: 17141

SEQ ID NO: 55188 - DNA, 45 bp, Homo Sapiens; identical to SEQ ID NO: 16995

SEQ ID NO: 55189 - DNA, 48 bp, Homo Sapiens; identical to SEQ ID NO: 6769

SEQ ID NO: 55190 - DNA, 30 bp, Homo Sapiens; identical to SEQ ID NO: 5130

SEQ ID NO: 55191 - DNA, 29 bp, Homo Sapiens
ctcctcgttagtatagtggtgagtatccc

SEQ ID NO: 55192 - DNA, 27 bp, Homo Sapiens
tttacagtcagaggttcaattcctctt

SEQ ID NO: 55193 - DNA, 32 bp, Homo Sapiens; identical to SEQ ID NO: 30922

SEQ ID NO: 55194 - DNA, 48 bp, Homo Sapiens; identical to SEQ ID NO: 2740

SEQ ID NO: 55195 - DNA, 34 bp, Homo Sapiens; identical to SEQ ID NO: 3107

SEQ ID NO: 55196 - DNA, 48 bp, Homo Sapiens; identical to SEQ ID NO: 16444

SEQ ID NO: 55197 - DNA, 16 bp, Homo Sapiens
tttaatctgagggtcc

SEQ ID NO: 55198 - DNA, 31 bp, Homo Sapiens; identical to SEQ ID NO: 8322

SEQ ID NO: 55199 - DNA, 48 bp, Homo Sapiens; identical to SEQ ID NO: 23495

SEQ ID NO: 55200 - DNA, 33 bp, Homo Sapiens; identical to SEQ ID NO: 20573

SEQ ID NO: 55201 - DNA, 30 bp, Homo Sapiens; identical to SEQ ID NO: 11357

SEQ ID NO: 55202 - DNA, 32 bp, Homo Sapiens; identical to SEQ ID NO: 17641

SEQ ID NO: 55203 - DNA, 36 bp, Homo Sapiens; identical to SEQ ID NO: 20912

SEQ ID NO: 55204 - DNA, 35 bp, Homo Sapiens; identical to SEQ ID NO: 1919

SEQ ID NO: 55205 - DNA, 29 bp, Homo Sapiens
tctgaaggtcgtgagttcgagcctcacac

SEQ ID NO: 55206 - DNA, 32 bp, Homo Sapiens; identical to SEQ ID NO: 12032

SEQ ID NO: 55207 - DNA, 39 bp, Homo Sapiens; identical to SEQ ID NO: 30468

SEQ ID NO: 55208 - DNA, 47 bp, Homo Sapiens; identical to SEQ ID NO: 21547

SEQ ID NO: 55209 - DNA, 31 bp, Homo Sapiens; identical to SEQ ID NO: 4260

SEQ ID NO: 55210 - DNA, 37 bp, Homo Sapiens; identical to SEQ ID NO: 9433

SEQ ID NO: 55211 - DNA, 29 bp, Homo Sapiens
cagttgacccgggttcgattcccggccaa

SEQ ID NO: 55212 - DNA, 33 bp, Homo Sapiens; identical to SEQ ID NO: 28539

SEQ ID NO: 55213 - DNA, 19 bp, Homo Sapiens
tcgtaaaccgaagatcgcg

SEQ ID NO: 55214 - DNA, 29 bp, Homo Sapiens
ttagtatagtggtgagtatccccgcctgt

SEQ ID NO: 55215 - DNA, 23 bp, Homo Sapiens
cctcctcaaagcaatacactgaa

SEQ ID NO: 55216 - DNA, 34 bp, Homo Sapiens; identical to SEQ ID NO: 783

SEQ ID NO: 55217 - DNA, 37 bp, Homo Sapiens; identical to SEQ ID NO: 28255

SEQ ID NO: 55218 - DNA, 25 bp, Homo Sapiens
tggcagagcccggtaatcgcataaa

SEQ ID NO: 55219 - DNA, 26 bp, Homo Sapiens
ctaatggtggagttaaagactttttc

SEQ ID NO: 55220 - DNA, 48 bp, Homo Sapiens; identical to SEQ ID NO: 24088

SEQ ID NO: 55221 - DNA, 38 bp, Homo Sapiens; identical to SEQ ID NO: 25440

SEQ ID NO: 55222 - DNA, 29 bp, Homo Sapiens
atccattggtcttaggccccaaaaatttt

SEQ ID NO: 55223 - DNA, 48 bp, Homo Sapiens; identical to SEQ ID NO: 16935

SEQ ID NO: 55224 - DNA, 32 bp, Homo Sapiens; identical to SEQ ID NO: 24640

SEQ ID NO: 55225 - DNA, 19 bp, Homo Sapiens
agcatgggactcttaatct

SEQ ID NO: 55226 - DNA, 31 bp, Homo Sapiens; identical to SEQ ID NO: 14000

SEQ ID NO: 55227 - DNA, 25 bp, Homo Sapiens
tcataatctgaaggtcgtgagttcg

SEQ ID NO: 55228 - DNA, 23 bp, Homo Sapiens
tctgaaggtcgtgagttcgagcc

SEQ ID NO: 55229 - DNA, 45 bp, Homo Sapiens; identical to SEQ ID NO: 15466

SEQ ID NO: 55230 - DNA, 43 bp, Homo Sapiens; identical to SEQ ID NO: 30472

SEQ ID NO: 55231 - DNA, 41 bp, Homo Sapiens; identical to SEQ ID NO: 7573

SEQ ID NO: 55232 - DNA, 33 bp, Homo Sapiens; identical to SEQ ID NO: 13075

SEQ ID NO: 55233 - DNA, 32 bp, Homo Sapiens; identical to SEQ ID NO: 18677

SEQ ID NO: 55234 - DNA, 40 bp, Homo Sapiens; identical to SEQ ID NO: 20229

SEQ ID NO: 55235 - DNA, 42 bp, Homo Sapiens; identical to SEQ ID NO: 23928

SEQ ID NO: 55236 - DNA, 30 bp, Homo Sapiens; identical to SEQ ID NO: 8321

SEQ ID NO: 55237 - DNA, 45 bp, Homo Sapiens; identical to SEQ ID NO: 15432

SEQ ID NO: 55238 - DNA, 34 bp, Homo Sapiens; identical to SEQ ID NO: 15596

SEQ ID NO: 55239 - DNA, 33 bp, Homo Sapiens; identical to SEQ ID NO: 8120

SEQ ID NO: 55240 - DNA, 34 bp, Homo Sapiens; identical to SEQ ID NO: 14626

SEQ ID NO: 55241 - DNA, 36 bp, Homo Sapiens; identical to SEQ ID NO: 19222

SEQ ID NO: 55242 - DNA, 34 bp, Homo Sapiens; identical to SEQ ID NO: 4416

SEQ ID NO: 55243 - DNA, 37 bp, Homo Sapiens; identical to SEQ ID NO: 1427

SEQ ID NO: 55244 - DNA, 32 bp, Homo Sapiens; identical to SEQ ID NO: 31106

SEQ ID NO: 55245 - DNA, 33 bp, Homo Sapiens; identical to SEQ ID NO: 9964

SEQ ID NO: 55246 - DNA, 26 bp, Homo Sapiens
tcacacgcgaaaggtccccggttcga

SEQ ID NO: 55247 - DNA, 27 bp, Homo Sapiens
agatcctgggttcgaatcccagcggtg

SEQ ID NO: 55248 - DNA, 19 bp, Homo Sapiens
taggattcggcgctttcac

SEQ ID NO: 55249 - DNA, 35 bp, Homo Sapiens; identical to SEQ ID NO: 14359

SEQ ID NO: 55250 - DNA, 35 bp, Homo Sapiens; identical to SEQ ID NO: 12750

SEQ ID NO: 55251 - DNA, 36 bp, Homo Sapiens; identical to SEQ ID NO: 8433

SEQ ID NO: 55252 - DNA, 42 bp, Homo Sapiens; identical to SEQ ID NO: 23938

SEQ ID NO: 55253 - DNA, 37 bp, Homo Sapiens; identical to SEQ ID NO: 14327

SEQ ID NO: 55254 - DNA, 40 bp, Homo Sapiens; identical to SEQ ID NO: 19243

SEQ ID NO: 55255 - DNA, 32 bp, Homo Sapiens; identical to SEQ ID NO: 1917

SEQ ID NO: 55256 - DNA, 31 bp, Homo Sapiens; identical to SEQ ID NO: 10931

SEQ ID NO: 55257 - DNA, 23 bp, Homo Sapiens
taggattcggcgctttcaccgcc

SEQ ID NO: 55258 - DNA, 29 bp, Homo Sapiens
tggaggcgtgggttcgaatcccacttctg

SEQ ID NO: 55259 - DNA, 31 bp, Homo Sapiens; identical to SEQ ID NO: 26658

SEQ ID NO: 55260 - DNA, 48 bp, Homo Sapiens; identical to SEQ ID NO: 7916

SEQ ID NO: 55261 - DNA, 35 bp, Homo Sapiens; identical to SEQ ID NO: 4954

SEQ ID NO: 55262 - DNA, 19 bp, Homo Sapiens
agtcggtggagcatgggac

SEQ ID NO: 55263 - DNA, 30 bp, Homo Sapiens; identical to SEQ ID NO: 26623

SEQ ID NO: 55264 - DNA, 35 bp, Homo Sapiens; identical to SEQ ID NO: 16692

SEQ ID NO: 55265 - DNA, 34 bp, Homo Sapiens; identical to SEQ ID NO: 28007

SEQ ID NO: 55266 - DNA, 33 bp, Homo Sapiens; identical to SEQ ID NO: 21754

SEQ ID NO: 55267 - DNA, 48 bp, Homo Sapiens; identical to SEQ ID NO: 10037

SEQ ID NO: 55268 - DNA, 37 bp, Homo Sapiens; identical to SEQ ID NO: 4001

SEQ ID NO: 55269 - DNA, 34 bp, Homo Sapiens; identical to SEQ ID NO: 26407

SEQ ID NO: 55270 - DNA, 40 bp, Homo Sapiens; identical to SEQ ID NO: 27866

SEQ ID NO: 55271 - DNA, 48 bp, Homo Sapiens; identical to SEQ ID NO: 6004

SEQ ID NO: 55272 - DNA, 27 bp, Homo Sapiens
gtcggtagagcatgagacccttaatct

SEQ ID NO: 55273 - DNA, 33 bp, Homo Sapiens; identical to SEQ ID NO: 6748

SEQ ID NO: 55274 - DNA, 25 bp, Homo Sapiens
ggaagcgtgctgggcccataaccca

SEQ ID NO: 55275 - DNA, 40 bp, Homo Sapiens; identical to SEQ ID NO: 26823

SEQ ID NO: 55276 - DNA, 23 bp, Homo Sapiens
gtagagcatgagacccttaatct

SEQ ID NO: 55277 - DNA, 32 bp, Homo Sapiens; identical to SEQ ID NO: 10687

SEQ ID NO: 55278 - DNA, 42 bp, Homo Sapiens; identical to SEQ ID NO: 6380

SEQ ID NO: 55279 - DNA, 31 bp, Homo Sapiens; identical to SEQ ID NO: 4348

SEQ ID NO: 55280 - DNA, 48 bp, Homo Sapiens; identical to SEQ ID NO: 13308

SEQ ID NO: 55281 - DNA, 36 bp, Homo Sapiens; identical to SEQ ID NO: 20889

SEQ ID NO: 55282 - DNA, 35 bp, Homo Sapiens; identical to SEQ ID NO: 25187

SEQ ID NO: 55283 - DNA, 27 bp, Homo Sapiens
atcagaagattctaggttcgactcctg

SEQ ID NO: 55284 - DNA, 34 bp, Homo Sapiens; identical to SEQ ID NO: 12822

SEQ ID NO: 55285 - DNA, 19 bp, Homo Sapiens
cgcattggtggttcagtgg

SEQ ID NO: 55286 - DNA, 40 bp, Homo Sapiens; identical to SEQ ID NO: 19720

SEQ ID NO: 55287 - DNA, 39 bp, Homo Sapiens; identical to SEQ ID NO: 25112

SEQ ID NO: 55288 - DNA, 37 bp, Homo Sapiens; identical to SEQ ID NO: 20913

SEQ ID NO: 55289 - DNA, 31 bp, Homo Sapiens; identical to SEQ ID NO: 12247

SEQ ID NO: 55290 - DNA, 17 bp, Homo Sapiens
tatagtggttagtatcc

SEQ ID NO: 55291 - DNA, 32 bp, Homo Sapiens; identical to SEQ ID NO: 14659

SEQ ID NO: 55292 - DNA, 16 bp, Homo Sapiens
gttcgagcctcacctg

SEQ ID NO: 55293 - DNA, 23 bp, Homo Sapiens
tagagcatgggactcttaatctc

SEQ ID NO: 55294 - DNA, 33 bp, Homo Sapiens; identical to SEQ ID NO: 27144

SEQ ID NO: 55295 - DNA, 40 bp, Homo Sapiens; identical to SEQ ID NO: 11417

SEQ ID NO: 55296 - DNA, 39 bp, Homo Sapiens; identical to SEQ ID NO: 29037

SEQ ID NO: 55297 - DNA, 32 bp, Homo Sapiens; identical to SEQ ID NO: 12248

SEQ ID NO: 55298 - DNA, 33 bp, Homo Sapiens; identical to SEQ ID NO: 18716

SEQ ID NO: 55299 - DNA, 16 bp, Homo Sapiens
tggttcgagcccaccc

SEQ ID NO: 55300 - DNA, 28 bp, Homo Sapiens
ttggcctcctaagccagggattgtgggt

SEQ ID NO: 55301 - DNA, 17 bp, Homo Sapiens
tagctcaggcggtagag

SEQ ID NO: 55302 - DNA, 27 bp, Homo Sapiens
ggggcgtgggttcgaatcccaccgctg

SEQ ID NO: 55303 - DNA, 20 bp, Homo Sapiens
tgtagtggtcatcacgttcg

SEQ ID NO: 55304 - DNA, 32 bp, Homo Sapiens; identical to SEQ ID NO: 11544

SEQ ID NO: 55305 - DNA, 31 bp, Homo Sapiens; identical to SEQ ID NO: 26321

SEQ ID NO: 55306 - DNA, 17 bp, Homo Sapiens
gttcgatccccgtacgg

SEQ ID NO: 55307 - DNA, 48 bp, Homo Sapiens; identical to SEQ ID NO: 12102

SEQ ID NO: 55308 - DNA, 29 bp, Homo Sapiens
cagcggaagcgtgctgggcccataaccca

SEQ ID NO: 55309 - DNA, 36 bp, Homo Sapiens; identical to SEQ ID NO: 23843

SEQ ID NO: 55310 - DNA, 16 bp, Homo Sapiens
ccggggttcgattccc

SEQ ID NO: 55311 - DNA, 17 bp, Homo Sapiens
tggttaggattcagcgc

SEQ ID NO: 55312 - DNA, 32 bp, Homo Sapiens; identical to SEQ ID NO: 21510

SEQ ID NO: 55313 - DNA, 32 bp, Homo Sapiens; identical to SEQ ID NO: 17588

SEQ ID NO: 55314 - DNA, 32 bp, Homo Sapiens; identical to SEQ ID NO: 11353

SEQ ID NO: 55315 - DNA, 45 bp, Homo Sapiens; identical to SEQ ID NO: 17637

SEQ ID NO: 55316 - DNA, 33 bp, Homo Sapiens; identical to SEQ ID NO: 3335

SEQ ID NO: 55317 - DNA, 33 bp, Homo Sapiens; identical to SEQ ID NO: 17570

SEQ ID NO: 55318 - DNA, 34 bp, Homo Sapiens; identical to SEQ ID NO: 28918

SEQ ID NO: 55319 - DNA, 47 bp, Homo Sapiens; identical to SEQ ID NO: 816

SEQ ID NO: 55320 - DNA, 26 bp, Homo Sapiens
cagtcggtagagcatgagacccttaa

SEQ ID NO: 55321 - DNA, 27 bp, Homo Sapiens
tagctcagtcggtagagcatgagaccc

SEQ ID NO: 55322 - DNA, 25 bp, Homo Sapiens
caatacactgaaaatgtttagacgg

SEQ ID NO: 55323 - DNA, 48 bp, Homo Sapiens; identical to SEQ ID NO: 28350

SEQ ID NO: 55324 - DNA, 25 bp, Homo Sapiens
ttagctgttaactaagtgtttgtgg

SEQ ID NO: 55325 - DNA, 39 bp, Homo Sapiens; identical to SEQ ID NO: 10310

SEQ ID NO: 55326 - DNA, 48 bp, Homo Sapiens; identical to SEQ ID NO: 17348

SEQ ID NO: 55327 - DNA, 48 bp, Homo Sapiens; identical to SEQ ID NO: 23772

SEQ ID NO: 55328 - DNA, 48 bp, Homo Sapiens; identical to SEQ ID NO: 6258

SEQ ID NO: 55329 - DNA, 34 bp, Homo Sapiens; identical to SEQ ID NO: 29843

SEQ ID NO: 55330 - DNA, 33 bp, Homo Sapiens; identical to SEQ ID NO: 23692

SEQ ID NO: 55331 - DNA, 25 bp, Homo Sapiens
agcagcttcaaacctgccggggctt

SEQ ID NO: 55332 - DNA, 34 bp, Homo Sapiens; identical to SEQ ID NO: 19911

SEQ ID NO: 55333 - DNA, 32 bp, Homo Sapiens; identical to SEQ ID NO: 23710

SEQ ID NO: 55334 - DNA, 16 bp, Homo Sapiens
taactagttttgacaa

SEQ ID NO: 55335 - DNA, 34 bp, Homo Sapiens; identical to SEQ ID NO: 20409

SEQ ID NO: 55336 - DNA, 48 bp, Homo Sapiens; identical to SEQ ID NO: 9513

SEQ ID NO: 55337 - DNA, 26 bp, Homo Sapiens
agcagcttcaaacctgccggggcttc

SEQ ID NO: 55338 - DNA, 48 bp, Homo Sapiens; identical to SEQ ID NO: 5318

SEQ ID NO: 55339 - DNA, 32 bp, Homo Sapiens; identical to SEQ ID NO: 3921

SEQ ID NO: 55340 - DNA, 27 bp, Homo Sapiens
tagctcagtcggtagagcatgagactc

SEQ ID NO: 55341 - DNA, 38 bp, Homo Sapiens; identical to SEQ ID NO: 14505

SEQ ID NO: 55342 - DNA, 34 bp, Homo Sapiens; identical to SEQ ID NO: 20393

SEQ ID NO: 55343 - DNA, 28 bp, Homo Sapiens
agaaatatgtctgataaaagagttactt

SEQ ID NO: 55344 - DNA, 21 bp, Homo Sapiens
tcaaagttaaattataggcta

SEQ ID NO: 55345 - DNA, 32 bp, Homo Sapiens; identical to SEQ ID NO: 23691

SEQ ID NO: 55346 - DNA, 17 bp, Homo Sapiens
tcttaatctcagggtcg

SEQ ID NO: 55347 - DNA, 18 bp, Homo Sapiens
ggggttcgattccttcct

SEQ ID NO: 55348 - DNA, 44 bp, Homo Sapiens; identical to SEQ ID NO: 14846

SEQ ID NO: 55349 - DNA, 30 bp, Homo Sapiens; identical to SEQ ID NO: 22648

SEQ ID NO: 55350 - DNA, 35 bp, Homo Sapiens; identical to SEQ ID NO: 18413

SEQ ID NO: 55351 - DNA, 26 bp, Homo Sapiens
gctcagtcggtagagcatgagactct

SEQ ID NO: 55352 - DNA, 17 bp, Homo Sapiens
ggggttcgattccttcc

SEQ ID NO: 55353 - DNA, 48 bp, Homo Sapiens; identical to SEQ ID NO: 16352

SEQ ID NO: 55354 - DNA, 23 bp, Homo Sapiens
gtagagcatgagactcttaatct

SEQ ID NO: 55355 - DNA, 27 bp, Homo Sapiens
aagagaaccaacacctctttacagtga

SEQ ID NO: 55356 - DNA, 48 bp, Homo Sapiens; identical to SEQ ID NO: 25250

SEQ ID NO: 55357 - DNA, 17 bp, Homo Sapiens
ttaactagttttgacaa

SEQ ID NO: 55358 - DNA, 25 bp, Homo Sapiens
cgggcccataccccgaaaatgttgg

SEQ ID NO: 55359 - DNA, 48 bp, Homo Sapiens; identical to SEQ ID NO: 24607

SEQ ID NO: 55360 - DNA, 26 bp, Homo Sapiens
gtagtggttatcacgttcgcctcaca

SEQ ID NO: 55361 - DNA, 35 bp, Homo Sapiens; identical to SEQ ID NO: 13650

SEQ ID NO: 55362 - DNA, 31 bp, Homo Sapiens; identical to SEQ ID NO: 29261

SEQ ID NO: 55363 - DNA, 25 bp, Homo Sapiens
cagattgtgaatctgacaacagagg

SEQ ID NO: 55364 - DNA, 29 bp, Homo Sapiens
ttaagagaaccaacacctctttacagtga

SEQ ID NO: 55365 - DNA, 34 bp, Homo Sapiens; identical to SEQ ID NO: 23693

SEQ ID NO: 55366 - DNA, 35 bp, Homo Sapiens; identical to SEQ ID NO: 3924

SEQ ID NO: 55367 - DNA, 31 bp, Homo Sapiens; identical to SEQ ID NO: 1153

SEQ ID NO: 55368 - DNA, 41 bp, Homo Sapiens; identical to SEQ ID NO: 19129

SEQ ID NO: 55369 - DNA, 33 bp, Homo Sapiens; identical to SEQ ID NO: 14500

SEQ ID NO: 55370 - DNA, 16 bp, Homo Sapiens
aaagcacccaacttac

SEQ ID NO: 55371 - DNA, 18 bp, Homo Sapiens
cctcaaagcaatacactg

SEQ ID NO: 55372 - DNA, 17 bp, Homo Sapiens
caactccaaataaaagt

SEQ ID NO: 55373 - DNA, 24 bp, Homo Sapiens
ttggtgcaactccaaataaaagta

SEQ ID NO: 55374 - DNA, 17 bp, Homo Sapiens
aaagctcacaagaactg

SEQ ID NO: 55375 - DNA, 32 bp, Homo Sapiens; identical to SEQ ID NO: 836

SEQ ID NO: 55376 - DNA, 27 bp, Homo Sapiens
tcagctaaataagctatcgggcccata

SEQ ID NO: 55377 - DNA, 17 bp, Homo Sapiens
gtcaggatggccgagca

SEQ ID NO: 55378 - DNA, 24 bp, Homo Sapiens
agattaagagaaccaacacctctt

SEQ ID NO: 55379 - DNA, 33 bp, Homo Sapiens; identical to SEQ ID NO: 3077

SEQ ID NO: 55380 - DNA, 18 bp, Homo Sapiens
attaactagttttgacaa

SEQ ID NO: 55381 - DNA, 31 bp, Homo Sapiens; identical to SEQ ID NO: 10266

SEQ ID NO: 55382 - DNA, 32 bp, Homo Sapiens; identical to SEQ ID NO: 3076

SEQ ID NO: 55383 - DNA, 16 bp, Homo Sapiens
ttaggagatttcaact

SEQ ID NO: 55384 - DNA, 44 bp, Homo Sapiens; identical to SEQ ID NO: 15269

SEQ ID NO: 55385 - DNA, 31 bp, Homo Sapiens; identical to SEQ ID NO: 3920

SEQ ID NO: 55386 - DNA, 34 bp, Homo Sapiens; identical to SEQ ID NO: 13417

SEQ ID NO: 55387 - DNA, 18 bp, Homo Sapiens
tgtctaacaacatggctt

SEQ ID NO: 55388 - DNA, 20 bp, Homo Sapiens
cttaggagatttcaacttaa

SEQ ID NO: 55389 - DNA, 38 bp, Homo Sapiens; identical to SEQ ID NO: 17343

SEQ ID NO: 55390 - DNA, 32 bp, Homo Sapiens; identical to SEQ ID NO: 22222

SEQ ID NO: 55391 - DNA, 17 bp, Homo Sapiens
ttcgaatcccactcctg

SEQ ID NO: 55392 - DNA, 30 bp, Homo Sapiens; identical to SEQ ID NO: 23689

SEQ ID NO: 55393 - DNA, 25 bp, Homo Sapiens
gaattgcaaattcgaagaagcagct

SEQ ID NO: 55394 - DNA, 16 bp, Homo Sapiens
agcttcaaacctgccg

SEQ ID NO: 55395 - DNA, 16 bp, Homo Sapiens
cttaatctcagggtcg

SEQ ID NO: 55396 - DNA, 33 bp, Homo Sapiens; identical to SEQ ID NO: 1625

SEQ ID NO: 55397 - DNA, 32 bp, Homo Sapiens; identical to SEQ ID NO: 10267

SEQ ID NO: 55398 - DNA, 34 bp, Homo Sapiens; identical to SEQ ID NO: 23712

SEQ ID NO: 55399 - DNA, 16 bp, Homo Sapiens
gtcgcagtctcccctg

SEQ ID NO: 55400 - DNA, 47 bp, Homo Sapiens; identical to SEQ ID NO: 977

SEQ ID NO: 55401 - DNA, 48 bp, Homo Sapiens; identical to SEQ ID NO: 3662

SEQ ID NO: 55402 - DNA, 26 bp, Homo Sapiens
agaaatatgtctgataaaagagttac

SEQ ID NO: 55403 - DNA, 37 bp, Homo Sapiens; identical to SEQ ID NO: 17342

SEQ ID NO: 55404 - DNA, 17 bp, Homo Sapiens
tgatttcgactcattaa

SEQ ID NO: 55405 - DNA, 44 bp, Homo Sapiens; identical to SEQ ID NO: 27177

SEQ ID NO: 55406 - DNA, 28 bp, Homo Sapiens
tatagtttaaccaaaacatcagattgtg

SEQ ID NO: 55407 - DNA, 19 bp, Homo Sapiens
agagaaccaacacctcttt

SEQ ID NO: 55408 - DNA, 16 bp, Homo Sapiens
ttaatctcagggtcgt

SEQ ID NO: 55409 - DNA, 17 bp, Homo Sapiens
atcagattgtgaatctg

SEQ ID NO: 55410 - DNA, 19 bp, Homo Sapiens
cccataccccgaaaatgtt

SEQ ID NO: 55411 - DNA, 20 bp, Homo Sapiens
gagcatgggactcttaatcc

SEQ ID NO: 55412 - DNA, 40 bp, Homo Sapiens; identical to SEQ ID NO: 538

SEQ ID NO: 55413 - DNA, 48 bp, Homo Sapiens; identical to SEQ ID NO: 29587

SEQ ID NO: 55414 - DNA, 32 bp, Homo Sapiens; identical to SEQ ID NO: 3911

SEQ ID NO: 55415 - DNA, 19 bp, Homo Sapiens
taagctatcgggcccatac

SEQ ID NO: 55416 - DNA, 48 bp, Homo Sapiens; identical to SEQ ID NO: 5129

SEQ ID NO: 55417 - DNA, 36 bp, Homo Sapiens; identical to SEQ ID NO: 1009

SEQ ID NO: 55418 - DNA, 38 bp, Homo Sapiens; identical to SEQ ID NO: 23697

SEQ ID NO: 55419 - DNA, 24 bp, Homo Sapiens
cagtctcataatctgaaggtcctg

SEQ ID NO: 55420 - DNA, 32 bp, Homo Sapiens; identical to SEQ ID NO: 1154

SEQ ID NO: 55421 - DNA, 41 bp, Homo Sapiens; identical to SEQ ID NO: 14156

SEQ ID NO: 55422 - DNA, 38 bp, Homo Sapiens; identical to SEQ ID NO: 28996

SEQ ID NO: 55423 - DNA, 32 bp, Homo Sapiens; identical to SEQ ID NO: 9799

SEQ ID NO: 55424 - DNA, 18 bp, Homo Sapiens
caaagcaatacactgaaa

SEQ ID NO: 55425 - DNA, 23 bp, Homo Sapiens
aaaaaccatttcataactttgtc

SEQ ID NO: 55426 - DNA, 33 bp, Homo Sapiens; identical to SEQ ID NO: 10211

SEQ ID NO: 55427 - DNA, 19 bp, Homo Sapiens
aagaagcagcttcaaacct

SEQ ID NO: 55428 - DNA, 16 bp, Homo Sapiens
gtcccttcgtggtcgc

SEQ ID NO: 55429 - DNA, 30 bp, Homo Sapiens; identical to SEQ ID NO: 23107

SEQ ID NO: 55430 - DNA, 25 bp, Homo Sapiens
cccgaaaatgttggttatacccttc

SEQ ID NO: 55431 - DNA, 35 bp, Homo Sapiens; identical to SEQ ID NO: 9802

SEQ ID NO: 55432 - DNA, 34 bp, Homo Sapiens; identical to SEQ ID NO: 8877

SEQ ID NO: 55433 - DNA, 18 bp, Homo Sapiens
agtggtagaattctcacc

SEQ ID NO: 55434 - DNA, 16 bp, Homo Sapiens
aacccccttatttcta

SEQ ID NO: 55435 - DNA, 29 bp, Homo Sapiens
cagctaaataagctatcgggcccataccc

SEQ ID NO: 55436 - DNA, 31 bp, Homo Sapiens; identical to SEQ ID NO: 24360

SEQ ID NO: 55437 - DNA, 16 bp, Homo Sapiens
atcctatatatcttac

SEQ ID NO: 55438 - DNA, 33 bp, Homo Sapiens; identical to SEQ ID NO: 23198

SEQ ID NO: 55439 - DNA, 17 bp, Homo Sapiens
tcctcacacggggcacc

SEQ ID NO: 55440 - DNA, 16 bp, Homo Sapiens
tggtgagcatagctgc

SEQ ID NO: 55441 - DNA, 17 bp, Homo Sapiens
attagaatcttagcttt

SEQ ID NO: 55442 - DNA, 16 bp, Homo Sapiens
tcttaatcccagggtc

SEQ ID NO: 55443 - DNA, 27 bp, Homo Sapiens
atcgggcccataccccgaaaatgttgg

SEQ ID NO: 55444 - DNA, 21 bp, Homo Sapiens
tggaggcgtgggttcgaatcc

SEQ ID NO: 55445 - DNA, 37 bp, Homo Sapiens; identical to SEQ ID NO: 20619

SEQ ID NO: 55446 - DNA, 25 bp, Homo Sapiens
gctaaataagctatcgggcccatac

SEQ ID NO: 55447 - DNA, 26 bp, Homo Sapiens
tactttgatagagtaaataataggag

SEQ ID NO: 55448 - DNA, 17 bp, Homo Sapiens
ccagagtgtagcttaac

SEQ ID NO: 55449 - DNA, 21 bp, Homo Sapiens
tctcataatctgaaggtcctg

SEQ ID NO: 55450 - DNA, 18 bp, Homo Sapiens
gggttcgattcccggtca

SEQ ID NO: 55451 - DNA, 35 bp, Homo Sapiens; identical to SEQ ID NO: 20410

SEQ ID NO: 55452 - DNA, 17 bp, Homo Sapiens
aaaagagttactttgat

SEQ ID NO: 55453 - DNA, 18 bp, Homo Sapiens
ggatggccgagtggtcta

SEQ ID NO: 55454 - DNA, 37 bp, Homo Sapiens; identical to SEQ ID NO: 28995

SEQ ID NO: 55455 - DNA, 31 bp, Homo Sapiens; identical to SEQ ID NO: 22926

SEQ ID NO: 55456 - DNA, 33 bp, Homo Sapiens; identical to SEQ ID NO: 20408

SEQ ID NO: 55457 - DNA, 26 bp, Homo Sapiens
gaattgcaaattcgaagaagcagctt

SEQ ID NO: 55458 - DNA, 48 bp, Homo Sapiens; identical to SEQ ID NO: 23010

SEQ ID NO: 55459 - DNA, 47 bp, Homo Sapiens; identical to SEQ ID NO: 19346

SEQ ID NO: 55460 - DNA, 16 bp, Homo Sapiens
tcagtctcataatctg

SEQ ID NO: 55461 - DNA, 37 bp, Homo Sapiens; identical to SEQ ID NO: 16346

SEQ ID NO: 55462 - DNA, 25 bp, Homo Sapiens
tcagtctcataatctgaaggtcctg

SEQ ID NO: 55463 - DNA, 27 bp, Homo Sapiens
ctaaataagctatcgggcccatacccc

SEQ ID NO: 55464 - DNA, 36 bp, Homo Sapiens; identical to SEQ ID NO: 13155

SEQ ID NO: 55465 - DNA, 16 bp, Homo Sapiens
tccctgttcaggcgcc

SEQ ID NO: 55466 - DNA, 21 bp, Homo Sapiens
gggtggttcagtggtagaatt

SEQ ID NO: 55467 - DNA, 16 bp, Homo Sapiens
ttagcgcagtaggtag

SEQ ID NO: 55468 - DNA, 19 bp, Homo Sapiens
aaccatttcataactttgt

SEQ ID NO: 55469 - DNA, 48 bp, Homo Sapiens; identical to SEQ ID NO: 4219

SEQ ID NO: 55470 - DNA, 23 bp, Homo Sapiens
acccaacttacacttaggagatt

SEQ ID NO: 55471 - DNA, 48 bp, Homo Sapiens; identical to SEQ ID NO: 23238

SEQ ID NO: 55472 - DNA, 16 bp, Homo Sapiens
tcgaacctcagagggg

SEQ ID NO: 55473 - DNA, 16 bp, Homo Sapiens
cagagcatttgactgc

SEQ ID NO: 55474 - DNA, 18 bp, Homo Sapiens
gattttcatattgaattg

SEQ ID NO: 55475 - DNA, 48 bp, Homo Sapiens; identical to SEQ ID NO: 8764

SEQ ID NO: 55476 - DNA, 48 bp, Homo Sapiens; identical to SEQ ID NO: 1630

SEQ ID NO: 55477 - DNA, 16 bp, Homo Sapiens
agaaagctcacaagaa

SEQ ID NO: 55478 - DNA, 19 bp, Homo Sapiens
cttaattaaagtggctgat

SEQ ID NO: 55479 - DNA, 32 bp, Homo Sapiens; identical to SEQ ID NO: 17616

SEQ ID NO: 55480 - DNA, 27 bp, Homo Sapiens
ttcgaagaagcagcttcaaacctgccg

SEQ ID NO: 55481 - DNA, 16 bp, Homo Sapiens
gttatcacatctgctt

SEQ ID NO: 55482 - DNA, 19 bp, Homo Sapiens
atgcccccatgtctaacaa

SEQ ID NO: 55483 - DNA, 33 bp, Homo Sapiens; identical to SEQ ID NO: 503

SEQ ID NO: 55484 - DNA, 36 bp, Homo Sapiens; identical to SEQ ID NO: 9686

SEQ ID NO: 55485 - DNA, 18 bp, Homo Sapiens
aaaaaccatttcataact

SEQ ID NO: 55486 - DNA, 31 bp, Homo Sapiens; identical to SEQ ID NO: 8886

SEQ ID NO: 55487 - DNA, 34 bp, Homo Sapiens; identical to SEQ ID NO: 391

SEQ ID NO: 55488 - DNA, 29 bp, Homo Sapiens
tcttaatctcagggtcgtgggttcgagcc

SEQ ID NO: 55489 - DNA, 19 bp, Homo Sapiens
agctgttaactaagtgttt

SEQ ID NO: 55490 - DNA, 23 bp, Homo Sapiens
taagagaaccaacacctctttac

SEQ ID NO: 55491 - DNA, 26 bp, Homo Sapiens
tgaattgcaaattcgaagaagcagct

SEQ ID NO: 55492 - DNA, 32 bp, Homo Sapiens; identical to SEQ ID NO: 30424

SEQ ID NO: 55493 - DNA, 17 bp, Homo Sapiens
aaaacttaaaactttac

SEQ ID NO: 55494 - DNA, 24 bp, Homo Sapiens
tcagattgtgaatctgacaacaga

SEQ ID NO: 55495 - DNA, 29 bp, Homo Sapiens
ttaacacaaagcacccaacttacacttag

SEQ ID NO: 55496 - DNA, 16 bp, Homo Sapiens
atagctcagtggtaga

SEQ ID NO: 55497 - DNA, 19 bp, Homo Sapiens
cctggtggtctagtggcta

SEQ ID NO: 55498 - DNA, 18 bp, Homo Sapiens
aatggtagaattctcgcc

SEQ ID NO: 55499 - DNA, 41 bp, Homo Sapiens; identical to SEQ ID NO: 14844

SEQ ID NO: 55500 - DNA, 33 bp, Homo Sapiens; identical to SEQ ID NO: 15757

SEQ ID NO: 55501 - DNA, 35 bp, Homo Sapiens; identical to SEQ ID NO: 27074

SEQ ID NO: 55502 - DNA, 26 bp, Homo Sapiens
aattgcaaattcgaagaagcagcttc

SEQ ID NO: 55503 - DNA, 17 bp, Homo Sapiens
ggttagcgcgttcggct

SEQ ID NO: 55504 - DNA, 27 bp, Homo Sapiens
agaggcttacgaccccttatttacccc

SEQ ID NO: 55505 - DNA, 30 bp, Homo Sapiens; identical to SEQ ID NO: 746

SEQ ID NO: 55506 - DNA, 17 bp, Homo Sapiens
aatagtaccgttaactt

SEQ ID NO: 55507 - DNA, 33 bp, Homo Sapiens; identical to SEQ ID NO: 949

SEQ ID NO: 55508 - DNA, 37 bp, Homo Sapiens; identical to SEQ ID NO: 10990

SEQ ID NO: 55509 - DNA, 35 bp, Homo Sapiens; identical to SEQ ID NO: 4436

SEQ ID NO: 55510 - DNA, 28 bp, Homo Sapiens
taggagcttaaacccccttatttctacc

SEQ ID NO: 55511 - DNA, 42 bp, Homo Sapiens; identical to SEQ ID NO: 23280

SEQ ID NO: 55512 - DNA, 33 bp, Homo Sapiens; identical to SEQ ID NO: 11630

SEQ ID NO: 55513 - DNA, 38 bp, Homo Sapiens; identical to SEQ ID NO: 6718

SEQ ID NO: 55514 - DNA, 31 bp, Homo Sapiens; identical to SEQ ID NO: 628

SEQ ID NO: 55515 - DNA, 37 bp, Homo Sapiens; identical to SEQ ID NO: 26429

SEQ ID NO: 55516 - DNA, 22 bp, Homo Sapiens
gcggttatcacgtctgctttac

SEQ ID NO: 55517 - DNA, 37 bp, Homo Sapiens; identical to SEQ ID NO: 10600

SEQ ID NO: 55518 - DNA, 32 bp, Homo Sapiens; identical to SEQ ID NO: 30037

SEQ ID NO: 55519 - DNA, 28 bp, Homo Sapiens
acagaggcttacgaccccttatttaccc

SEQ ID NO: 55520 - DNA, 46 bp, Homo Sapiens; identical to SEQ ID NO: 3398

SEQ ID NO: 55521 - DNA, 37 bp, Homo Sapiens; identical to SEQ ID NO: 13652

SEQ ID NO: 55522 - DNA, 37 bp, Homo Sapiens; identical to SEQ ID NO: 29552

SEQ ID NO: 55523 - DNA, 46 bp, Homo Sapiens; identical to SEQ ID NO: 17150

SEQ ID NO: 55524 - DNA, 34 bp, Homo Sapiens; identical to SEQ ID NO: 18726

SEQ ID NO: 55525 - DNA, 21 bp, Homo Sapiens
tcgagtctcggtggaacctcc

SEQ ID NO: 55526 - DNA, 47 bp, Homo Sapiens; identical to SEQ ID NO: 1244

SEQ ID NO: 55527 - DNA, 23 bp, Homo Sapiens
tgtagtggttatcacgtctgctt

SEQ ID NO: 55528 - DNA, 27 bp, Homo Sapiens
tttgacaacattcaaaaaagagtacca

SEQ ID NO: 55529 - DNA, 37 bp, Homo Sapiens; identical to SEQ ID NO: 3225

SEQ ID NO: 55530 - DNA, 26 bp, Homo Sapiens
atgggttcgattctcatagtcctagc

SEQ ID NO: 55531 - DNA, 25 bp, Homo Sapiens
ttgacaacattcaaaaaagagtacc

SEQ ID NO: 55532 - DNA, 37 bp, Homo Sapiens; identical to SEQ ID NO: 6724

SEQ ID NO: 55533 - DNA, 45 bp, Homo Sapiens; identical to SEQ ID NO: 17149

SEQ ID NO: 55534 - DNA, 34 bp, Homo Sapiens; identical to SEQ ID NO: 8270

SEQ ID NO: 55535 - DNA, 18 bp, Homo Sapiens
agattgagggttcgagtc

SEQ ID NO: 55536 - DNA, 32 bp, Homo Sapiens; identical to SEQ ID NO: 16988

SEQ ID NO: 55537 - DNA, 43 bp, Homo Sapiens; identical to SEQ ID NO: 217

SEQ ID NO: 55538 - DNA, 21 bp, Homo Sapiens
tagcggttatcacattcgcct

SEQ ID NO: 55539 - DNA, 25 bp, Homo Sapiens
taagttgcaatacttaatttctgcc

SEQ ID NO: 55540 - DNA, 42 bp, Homo Sapiens; identical to SEQ ID NO: 19943

SEQ ID NO: 55541 - DNA, 29 bp, Homo Sapiens
ccatagtgtagtggttatcacgtctgctt

SEQ ID NO: 55542 - DNA, 34 bp, Homo Sapiens; identical to SEQ ID NO: 27921

SEQ ID NO: 55543 - DNA, 47 bp, Homo Sapiens; identical to SEQ ID NO: 19947

SEQ ID NO: 55544 - DNA, 26 bp, Homo Sapiens
gatgggttcgattctcatagtcctag

SEQ ID NO: 55545 - DNA, 28 bp, Homo Sapiens
cgcgggagaccggggttcgattccccga

SEQ ID NO: 55546 - DNA, 29 bp, Homo Sapiens
cagtcggtagagcatgggactcttaatcc

SEQ ID NO: 55547 - DNA, 40 bp, Homo Sapiens; identical to SEQ ID NO: 23028

SEQ ID NO: 55548 - DNA, 34 bp, Homo Sapiens; identical to SEQ ID NO: 29575

SEQ ID NO: 55549 - DNA, 26 bp, Homo Sapiens
aggcggcccgggttcgactcccggtg

SEQ ID NO: 55550 - DNA, 38 bp, Homo Sapiens; identical to SEQ ID NO: 1483

SEQ ID NO: 55551 - DNA, 28 bp, Homo Sapiens
ggtagaattctcgcctgccacgcgggag

SEQ ID NO: 55552 - DNA, 32 bp, Homo Sapiens; identical to SEQ ID NO: 12093

SEQ ID NO: 55553 - DNA, 44 bp, Homo Sapiens; identical to SEQ ID NO: 19944

SEQ ID NO: 55554 - DNA, 35 bp, Homo Sapiens; identical to SEQ ID NO: 18739

SEQ ID NO: 55555 - DNA, 18 bp, Homo Sapiens
gcggcccgggttcgactc

SEQ ID NO: 55556 - DNA, 21 bp, Homo Sapiens
tagctgttaactaagtgtttg

SEQ ID NO: 55557 - DNA, 33 bp, Homo Sapiens; identical to SEQ ID NO: 449

SEQ ID NO: 55558 - DNA, 37 bp, Homo Sapiens; identical to SEQ ID NO: 22611

SEQ ID NO: 55559 - DNA, 16 bp, Homo Sapiens
tagtatccccgcctgt

SEQ ID NO: 55560 - DNA, 35 bp, Homo Sapiens; identical to SEQ ID NO: 8385

SEQ ID NO: 55561 - DNA, 25 bp, Homo Sapiens
cagaccaagagccttcaaagccctc

SEQ ID NO: 55562 - DNA, 16 bp, Homo Sapiens
ttcgatccccggcatc

SEQ ID NO: 55563 - DNA, 29 bp, Homo Sapiens
gttttgacaacattcaaaaaagagtacca

SEQ ID NO: 55564 - DNA, 26 bp, Homo Sapiens
tgcgtgttcaagtcacgtcggggtca

SEQ ID NO: 55565 - DNA, 20 bp, Homo Sapiens
agtggttatcacgtctgctt

SEQ ID NO: 55566 - DNA, 41 bp, Homo Sapiens; identical to SEQ ID NO: 22706

SEQ ID NO: 55567 - DNA, 27 bp, Homo Sapiens
gatggggtgtgataggtggcacggaga

SEQ ID NO: 55568 - DNA, 24 bp, Homo Sapiens
tcggtagagcatgggactcttaat

SEQ ID NO: 55569 - DNA, 18 bp, Homo Sapiens
aaacccccttatttctac

SEQ ID NO: 55570 - DNA, 29 bp, Homo Sapiens
tgtagctcagtggtagagcatttgactgc

SEQ ID NO: 55571 - DNA, 37 bp, Homo Sapiens; identical to SEQ ID NO: 19718

SEQ ID NO: 55572 - DNA, 26 bp, Homo Sapiens
cataaaacttaaaactttacagtcag

SEQ ID NO: 55573 - DNA, 28 bp, Homo Sapiens
tagctgttaactaagtgtttgtgggttt

SEQ ID NO: 55574 - DNA, 23 bp, Homo Sapiens
tctcagggatgggttcgattctc

SEQ ID NO: 55575 - DNA, 29 bp, Homo Sapiens
agcagttgacccgggttcgattcccggcc

SEQ ID NO: 55576 - DNA, 20 bp, Homo Sapiens
ttcgagccccagtggaacca

SEQ ID NO: 55577 - DNA, 22 bp, Homo Sapiens
gaggtcgatggatcgaaaccat

SEQ ID NO: 55578 - DNA, 31 bp, Homo Sapiens; identical to SEQ ID NO: 3156

SEQ ID NO: 55579 - DNA, 23 bp, Homo Sapiens
tcaggatggccgagtggtctaag

SEQ ID NO: 55580 - DNA, 26 bp, Homo Sapiens
cagttgatgcagagtggggttttgca

SEQ ID NO: 55581 - DNA, 30 bp, Homo Sapiens; identical to SEQ ID NO: 8278

SEQ ID NO: 55582 - DNA, 29 bp, Homo Sapiens
actaagtgtttgtgggtttaagtcccatt

SEQ ID NO: 55583 - DNA, 24 bp, Homo Sapiens
tctgacaacagaggcttacgaccc

SEQ ID NO: 55584 - DNA, 34 bp, Homo Sapiens; identical to SEQ ID NO: 12250

SEQ ID NO: 55585 - DNA, 26 bp, Homo Sapiens
cggcccgggttcgactcccggtgtgg

SEQ ID NO: 55586 - DNA, 23 bp, Homo Sapiens
cgctctcaccgccgcggcccggg

SEQ ID NO: 55587 - DNA, 22 bp, Homo Sapiens
agctttggggggttcgattcct

SEQ ID NO: 55588 - DNA, 25 bp, Homo Sapiens
gagaccggggttcgattccccgacg

SEQ ID NO: 55589 - DNA, 27 bp, Homo Sapiens
tctcgcctgccacgcgggaggcccggg

SEQ ID NO: 55590 - DNA, 18 bp, Homo Sapiens
ctgttaactaagtgtttg

SEQ ID NO: 55591 - DNA, 16 bp, Homo Sapiens
cgtagtgtagtggtca

SEQ ID NO: 55592 - DNA, 20 bp, Homo Sapiens
atccttaggtcgctggttcg

SEQ ID NO: 55593 - DNA, 17 bp, Homo Sapiens
gcggcccgggttcgatt

SEQ ID NO: 55594 - DNA, 29 bp, Homo Sapiens
tcgcgggttcgaaccccgtacgggccacc

SEQ ID NO: 55595 - DNA, 28 bp, Homo Sapiens
ggagaccggggttcaattccccgacggg

SEQ ID NO: 55596 - DNA, 18 bp, Homo Sapiens
cgagtcccggcggagtcg

SEQ ID NO: 55597 - DNA, 39 bp, Homo Sapiens; identical to SEQ ID NO: 12137

SEQ ID NO: 55598 - DNA, 20 bp, Homo Sapiens
gtcagaggttcaattcctct

SEQ ID NO: 55599 - DNA, 22 bp, Homo Sapiens
gtagtgtagcggttatcacatt

SEQ ID NO: 55600 - DNA, 16 bp, Homo Sapiens
ctcgcctgccacgcgg

SEQ ID NO: 55601 - DNA, 23 bp, Homo Sapiens
tctgaaggtcctgagttcgaacc

SEQ ID NO: 55602 - DNA, 19 bp, Homo Sapiens
cacgttcgcctcacacgcg

SEQ ID NO: 55603 - DNA, 25 bp, Homo Sapiens
acttcggatcagaagattgcaggtt

SEQ ID NO: 55604 - DNA, 17 bp, Homo Sapiens
ggttcgatcccgggttt

SEQ ID NO: 55605 - DNA, 21 bp, Homo Sapiens
tctcagggatgggttcgattc

SEQ ID NO: 55606 - DNA, 20 bp, Homo Sapiens
accagaatggccgagtggtt

SEQ ID NO: 55607 - DNA, 23 bp, Homo Sapiens
cttagcattaaccttttaagtta

SEQ ID NO: 55608 - DNA, 33 bp, Homo Sapiens; identical to SEQ ID NO: 23711

SEQ ID NO: 55609 - DNA, 35 bp, Homo Sapiens; identical to SEQ ID NO: 9807

SEQ ID NO: 55610 - DNA, 37 bp, Homo Sapiens; identical to SEQ ID NO: 21653

SEQ ID NO: 55611 - DNA, 36 bp, Homo Sapiens; identical to SEQ ID NO: 23695

SEQ ID NO: 55612 - DNA, 26 bp, Homo Sapiens
gcccccatgtctaacaacatggcttt

SEQ ID NO: 55613 - DNA, 23 bp, Homo Sapiens
gtagagcatgggactcttaatcc

SEQ ID NO: 55614 - DNA, 16 bp, Homo Sapiens
agagaaccaacacctc

SEQ ID NO: 55615 - DNA, 31 bp, Homo Sapiens; identical to SEQ ID NO: 27530

SEQ ID NO: 55616 - DNA, 32 bp, Homo Sapiens; identical to SEQ ID NO: 206

SEQ ID NO: 55617 - DNA, 25 bp, Homo Sapiens
agaaatatgtctgataaaagagtta

SEQ ID NO: 55618 - DNA, 24 bp, Homo Sapiens
gcagcttcaaacctgccggggctt

SEQ ID NO: 55619 - DNA, 28 bp, Homo Sapiens
ctagctcagtcggtagagcatgagactc

SEQ ID NO: 55620 - DNA, 16 bp, Homo Sapiens
tccaggtgccccctcc

SEQ ID NO: 55621 - DNA, 26 bp, Homo Sapiens
gtggtatagtggtgagcatagctgcc

SEQ ID NO: 55622 - DNA, 25 bp, Homo Sapiens
gcagcttcaaacctgccggggcttc

SEQ ID NO: 55623 - DNA, 31 bp, Homo Sapiens; identical to SEQ ID NO: 205

SEQ ID NO: 55624 - DNA, 18 bp, Homo Sapiens
aatggatagcgcattgga

SEQ ID NO: 55625 - DNA, 16 bp, Homo Sapiens
ctggtgtagtggtatc

SEQ ID NO: 55626 - DNA, 17 bp, Homo Sapiens
aacccccttatttctac

SEQ ID NO: 55627 - DNA, 18 bp, Homo Sapiens
agatttcaacttaacttg

SEQ ID NO: 55628 - DNA, 21 bp, Homo Sapiens
aaccaacacctctttacagtg

SEQ ID NO: 55629 - DNA, 19 bp, Homo Sapiens
aataagctatcgggcccat

SEQ ID NO: 55630 - DNA, 17 bp, Homo Sapiens
tggtctagtggttagga

SEQ ID NO: 55631 - DNA, 27 bp, Homo Sapiens
taacacaaagcacccaacttacactta

SEQ ID NO: 55632 - DNA, 17 bp, Homo Sapiens
gtcccatctggggtgcc

SEQ ID NO: 55633 - DNA, 20 bp, Homo Sapiens
ccaacttacacttaggagat

SEQ ID NO: 55634 - DNA, 34 bp, Homo Sapiens; identical to SEQ ID NO: 18264

SEQ ID NO: 55635 - DNA, 16 bp, Homo Sapiens
cgatccccagtacctc

SEQ ID NO: 55636 - DNA, 21 bp, Homo Sapiens
cattaaattatgataatcata

SEQ ID NO: 55637 - DNA, 27 bp, Homo Sapiens
taaattagaatcttagctttgggtgct

SEQ ID NO: 55638 - DNA, 18 bp, Homo Sapiens
cttataatgccgaggttg

SEQ ID NO: 55639 - DNA, 25 bp, Homo Sapiens
agaagcagcttcaaacctgccgggg

SEQ ID NO: 55640 - DNA, 21 bp, Homo Sapiens
gggctcacatcaccccataaa

SEQ ID NO: 55641 - DNA, 16 bp, Homo Sapiens
gtggtatagtggtgag

SEQ ID NO: 55642 - DNA, 20 bp, Homo Sapiens
ggtatagctcagtggtagag

SEQ ID NO: 55643 - DNA, 25 bp, Homo Sapiens
agtttaaattagaatcttagctttg

SEQ ID NO: 55644 - DNA, 18 bp, Homo Sapiens
ctttgatagagtaaataa

SEQ ID NO: 55645 - DNA, 35 bp, Homo Sapiens; identical to SEQ ID NO: 14588

SEQ ID NO: 55646 - DNA, 31 bp, Homo Sapiens; identical to SEQ ID NO: 21139

SEQ ID NO: 55647 - DNA, 37 bp, Homo Sapiens; identical to SEQ ID NO: 19549

SEQ ID NO: 55648 - DNA, 39 bp, Homo Sapiens; identical to SEQ ID NO: 5705

SEQ ID NO: 55649 - DNA, 33 bp, Homo Sapiens; identical to SEQ ID NO: 11999

SEQ ID NO: 55650 - DNA, 42 bp, Homo Sapiens; identical to SEQ ID NO: 3455

SEQ ID NO: 55651 - DNA, 40 bp, Homo Sapiens; identical to SEQ ID NO: 5706

SEQ ID NO: 55652 - DNA, 46 bp, Homo Sapiens; identical to SEQ ID NO: 8799

SEQ ID NO: 55653 - DNA, 33 bp, Homo Sapiens; identical to SEQ ID NO: 29548

SEQ ID NO: 55654 - DNA, 44 bp, Homo Sapiens; identical to SEQ ID NO: 14159

SEQ ID NO: 55655 - DNA, 36 bp, Homo Sapiens; identical to SEQ ID NO: 10158

SEQ ID NO: 55656 - DNA, 27 bp, Homo Sapiens
agatgaaaacctttttccaaggacacc

SEQ ID NO: 55657 - DNA, 27 bp, Homo Sapiens
aggagcttaaacccccttatttctacc

SEQ ID NO: 55658 - DNA, 31 bp, Homo Sapiens; identical to SEQ ID NO: 25557

SEQ ID NO: 55659 - DNA, 32 bp, Homo Sapiens; identical to SEQ ID NO: 17006

SEQ ID NO: 55660 - DNA, 43 bp, Homo Sapiens; identical to SEQ ID NO: 17413

SEQ ID NO: 55661 - DNA, 26 bp, Homo Sapiens
tagtgtagtggtcatcacgttcgcct

SEQ ID NO: 55662 - DNA, 20 bp, Homo Sapiens
gtggttatcacgttcgccta

SEQ ID NO: 55663 - DNA, 30 bp, Homo Sapiens; identical to SEQ ID NO: 2977

SEQ ID NO: 55664 - DNA, 31 bp, Homo Sapiens; identical to SEQ ID NO: 11009

SEQ ID NO: 55665 - DNA, 43 bp, Homo Sapiens; identical to SEQ ID NO: 16572

SEQ ID NO: 55666 - DNA, 38 bp, Homo Sapiens; identical to SEQ ID NO: 3226

SEQ ID NO: 55667 - DNA, 26 bp, Homo Sapiens
gagatgaaaacctttttccaaggaca

SEQ ID NO: 55668 - DNA, 28 bp, Homo Sapiens
ttcggcgctctcaccgccgcggcccggg

SEQ ID NO: 55669 - DNA, 42 bp, Homo Sapiens; identical to SEQ ID NO: 16649

SEQ ID NO: 55670 - DNA, 41 bp, Homo Sapiens; identical to SEQ ID NO: 16648

SEQ ID NO: 55671 - DNA, 33 bp, Homo Sapiens; identical to SEQ ID NO: 18701

SEQ ID NO: 55672 - DNA, 28 bp, Homo Sapiens
aggagcttaaacccccttatttctacca

SEQ ID NO: 55673 - DNA, 34 bp, Homo Sapiens; identical to SEQ ID NO: 18738

SEQ ID NO: 55674 - DNA, 30 bp, Homo Sapiens; identical to SEQ ID NO: 15331

SEQ ID NO: 55675 - DNA, 40 bp, Homo Sapiens; identical to SEQ ID NO: 2342

SEQ ID NO: 55676 - DNA, 34 bp, Homo Sapiens; identical to SEQ ID NO: 10156

SEQ ID NO: 55677 - DNA, 44 bp, Homo Sapiens; identical to SEQ ID NO: 12142

SEQ ID NO: 55678 - DNA, 27 bp, Homo Sapiens
caggcggcccgggttcgactcccggtg

SEQ ID NO: 55679 - DNA, 33 bp, Homo Sapiens; identical to SEQ ID NO: 27269

SEQ ID NO: 55680 - DNA, 35 bp, Homo Sapiens; identical to SEQ ID NO: 8310

SEQ ID NO: 55681 - DNA, 24 bp, Homo Sapiens
gagttcaaatctcgctggggcctc

SEQ ID NO: 55682 - DNA, 25 bp, Homo Sapiens
tctgacaacagaggcttacgacccc

SEQ ID NO: 55683 - DNA, 34 bp, Homo Sapiens; identical to SEQ ID NO: 30039

SEQ ID NO: 55684 - DNA, 17 bp, Homo Sapiens
aagttctggtctccgga

SEQ ID NO: 55685 - DNA, 19 bp, Homo Sapiens
gttcaatccccggcatctc

SEQ ID NO: 55686 - DNA, 21 bp, Homo Sapiens
gcggcccgggttcgattcccg

SEQ ID NO: 55687 - DNA, 32 bp, Homo Sapiens; identical to SEQ ID NO: 18633

SEQ ID NO: 55688 - DNA, 29 bp, Homo Sapiens
atagtggttagtactctgcgttgtggccg

SEQ ID NO: 55689 - DNA, 23 bp, Homo Sapiens
gtcggtagagcatgggactctta

SEQ ID NO: 55690 - DNA, 21 bp, Homo Sapiens
actcaagttctggtctccgga

SEQ ID NO: 55691 - DNA, 35 bp, Homo Sapiens; identical to SEQ ID NO: 21800

SEQ ID NO: 55692 - DNA, 23 bp, Homo Sapiens
ggtagaattctcgcctgccacgc

SEQ ID NO: 55693 - DNA, 26 bp, Homo Sapiens
gtggttatcacgttcgcctcacacgc

SEQ ID NO: 55694 - DNA, 32 bp, Homo Sapiens; identical to SEQ ID NO: 11412

SEQ ID NO: 55695 - DNA, 21 bp, Homo Sapiens
gtggtagagcgcatgctttgc

SEQ ID NO: 55696 - DNA, 22 bp, Homo Sapiens
gacccgggttcgattcccggcc

SEQ ID NO: 55697 - DNA, 22 bp, Homo Sapiens
gtctcataatctgaaggtcgtg

SEQ ID NO: 55698 - DNA, 20 bp, Homo Sapiens
gtggttatcacatctgcttt

SEQ ID NO: 55699 - DNA, 20 bp, Homo Sapiens
tcgagtctcggtggaacctc

SEQ ID NO: 55700 - DNA, 26 bp, Homo Sapiens
aattatgataatcatatttaccaacc

SEQ ID NO: 55701 - DNA, 21 bp, Homo Sapiens
tcgagtcccaccagagtcgcc

SEQ ID NO: 55702 - DNA, 25 bp, Homo Sapiens
atggggtgtgataggtggcacggag

SEQ ID NO: 55703 - DNA, 19 bp, Homo Sapiens
tgcacgaggccccgggttc

SEQ ID NO: 55704 - DNA, 21 bp, Homo Sapiens
gaaaacctttttccaaggaca

SEQ ID NO: 55705 - DNA, 23 bp, Homo Sapiens
gttcgattccccaacggggagcc

SEQ ID NO: 55706 - DNA, 24 bp, Homo Sapiens
ggttcgattcccggccaatgcacc

SEQ ID NO: 55707 - DNA, 23 bp, Homo Sapiens
gttatcacgtctgctttacacgc

SEQ ID NO: 55708 - DNA, 20 bp, Homo Sapiens
ggatggccgagtggtctaag

SEQ ID NO: 55709 - DNA, 21 bp, Homo Sapiens
agttcgagtctcggtggaacc

SEQ ID NO: 55710 - DNA, 30 bp, Homo Sapiens; identical to SEQ ID NO: 18787

SEQ ID NO: 55711 - DNA, 23 bp, Homo Sapiens
taaaccgaagatcacgggttcga

SEQ ID NO: 55712 - DNA, 23 bp, Homo Sapiens
taggtcgctggttcgaatccggc

SEQ ID NO: 55713 - DNA, 18 bp, Homo Sapiens
cgatgcccgcatcctcca

SEQ ID NO: 55714 - DNA, 38 bp, Homo Sapiens; identical to SEQ ID NO: 16291

SEQ ID NO: 55715 - DNA, 16 bp, Homo Sapiens
gttaggattcctggtt

SEQ ID NO: 55716 - DNA, 26 bp, Homo Sapiens
gtgtagtggttatcacgttcgcctca

SEQ ID NO: 55717 - DNA, 27 bp, Homo Sapiens
gcccccatgtctaacaacatggctttc

SEQ ID NO: 55718 - DNA, 26 bp, Homo Sapiens
cagattgtgaatctgacaacagaggc

SEQ ID NO: 55719 - DNA, 28 bp, Homo Sapiens
taactttgtcaaagttaaattataggct

SEQ ID NO: 55720 - DNA, 16 bp, Homo Sapiens
cttaatcccagggtcg

SEQ ID NO: 55721 - DNA, 18 bp, Homo Sapiens
tttgcgttcagttgatgc

SEQ ID NO: 55722 - DNA, 17 bp, Homo Sapiens
aaaatgttggttatacc

SEQ ID NO: 55723 - DNA, 16 bp, Homo Sapiens
aaatgttggttatacc

SEQ ID NO: 55724 - DNA, 22 bp, Homo Sapiens
ttaggagatttcaacttaactt

SEQ ID NO: 55725 - DNA, 16 bp, Homo Sapiens
ttcctcttcttaacac

SEQ ID NO: 55726 - DNA, 17 bp, Homo Sapiens
aagacaggggttaggcc

SEQ ID NO: 55727 - DNA, 17 bp, Homo Sapiens
gtcccatctgggtcgcc

SEQ ID NO: 55728 - DNA, 22 bp, Homo Sapiens
cagcttcaaacctgccggggct

SEQ ID NO: 55729 - DNA, 18 bp, Homo Sapiens
aagaagcagcttcaaacc

SEQ ID NO: 55730 - DNA, 27 bp, Homo Sapiens
tgcccccatgtctaacaacatggcttt

SEQ ID NO: 55731 - DNA, 20 bp, Homo Sapiens
cttttaagttaaagattaag

SEQ ID NO: 55732 - DNA, 18 bp, Homo Sapiens
tgtagtgtagtggttatc

SEQ ID NO: 55733 - DNA, 16 bp, Homo Sapiens
ctaggggtatgattct

SEQ ID NO: 55734 - DNA, 16 bp, Homo Sapiens
gttaaagactttttct

SEQ ID NO: 55735 - DNA, 22 bp, Homo Sapiens
ttcgaagaagcagcttcaaacc

SEQ ID NO: 55736 - DNA, 30 bp, Homo Sapiens; identical to SEQ ID NO: 4209

SEQ ID NO: 55737 - DNA, 19 bp, Homo Sapiens
cgtggccgagtggttaagg

SEQ ID NO: 55738 - DNA, 28 bp, Homo Sapiens
gtgagcactctggactctgaatccagcg

SEQ ID NO: 55739 - DNA, 23 bp, Homo Sapiens
tggaggcgtgggttcgaatccca

SEQ ID NO: 55740 - DNA, 19 bp, Homo Sapiens
gtagtgtagtggttatcac

SEQ ID NO: 55741 - DNA, 35 bp, Homo Sapiens; identical to SEQ ID NO: 12014

SEQ ID NO: 55742 - DNA, 35 bp, Homo Sapiens; identical to SEQ ID NO: 27922

SEQ ID NO: 55743 - DNA, 36 bp, Homo Sapiens; identical to SEQ ID NO: 11967

SEQ ID NO: 55744 - DNA, 47 bp, Homo Sapiens; identical to SEQ ID NO: 1114

SEQ ID NO: 55745 - DNA, 30 bp, Homo Sapiens; identical to SEQ ID NO: 7417

SEQ ID NO: 55746 - DNA, 35 bp, Homo Sapiens; identical to SEQ ID NO: 6213

SEQ ID NO: 55747 - DNA, 27 bp, Homo Sapiens
ggtagaattctcgcctgccacgcggga

SEQ ID NO: 55748 - DNA, 23 bp, Homo Sapiens
agactcaagttctggtctccgga

SEQ ID NO: 55749 - DNA, 30 bp, Homo Sapiens; identical to SEQ ID NO: 18355

SEQ ID NO: 55750 - DNA, 35 bp, Homo Sapiens; identical to SEQ ID NO: 26852

SEQ ID NO: 55751 - DNA, 32 bp, Homo Sapiens; identical to SEQ ID NO: 4132

SEQ ID NO: 55752 - DNA, 36 bp, Homo Sapiens; identical to SEQ ID NO: 8576

SEQ ID NO: 55753 - DNA, 44 bp, Homo Sapiens; identical to SEQ ID NO: 27629

SEQ ID NO: 55754 - DNA, 29 bp, Homo Sapiens
gatgggttcgattctcatagtcctagcca

SEQ ID NO: 55755 - DNA, 44 bp, Homo Sapiens; identical to SEQ ID NO: 16651

SEQ ID NO: 55756 - DNA, 43 bp, Homo Sapiens; identical to SEQ ID NO: 17864

SEQ ID NO: 55757 - DNA, 26 bp, Homo Sapiens
gtagaattctcgcctgccacgcggga

SEQ ID NO: 55758 - DNA, 21 bp, Homo Sapiens
aaacctttttccaaggacacc

SEQ ID NO: 55759 - DNA, 33 bp, Homo Sapiens; identical to SEQ ID NO: 22561

SEQ ID NO: 55760 - DNA, 46 bp, Homo Sapiens; identical to SEQ ID NO: 25716

SEQ ID NO: 55761 - DNA, 42 bp, Homo Sapiens; identical to SEQ ID NO: 25488

SEQ ID NO: 55762 - DNA, 42 bp, Homo Sapiens; identical to SEQ ID NO: 216

SEQ ID NO: 55763 - DNA, 32 bp, Homo Sapiens; identical to SEQ ID NO: 20365

SEQ ID NO: 55764 - DNA, 24 bp, Homo Sapiens
ccatatggtctagcggttaggatt

SEQ ID NO: 55765 - DNA, 21 bp, Homo Sapiens
acagaggcttacgacccctta

SEQ ID NO: 55766 - DNA, 32 bp, Homo Sapiens; identical to SEQ ID NO: 22553

SEQ ID NO: 55767 - DNA, 38 bp, Homo Sapiens; identical to SEQ ID NO: 3082

SEQ ID NO: 55768 - DNA, 26 bp, Homo Sapiens
cggagatgaaaacctttttccaagga

SEQ ID NO: 55769 - DNA, 42 bp, Homo Sapiens; identical to SEQ ID NO: 22550

SEQ ID NO: 55770 - DNA, 25 bp, Homo Sapiens
agctcacaagaactgctaactcatg

SEQ ID NO: 55771 - DNA, 24 bp, Homo Sapiens
tgtagcggttatcacattcgcctc

SEQ ID NO: 55772 - DNA, 27 bp, Homo Sapiens
gtagaattctcgcctgccacgcgggag

SEQ ID NO: 55773 - DNA, 19 bp, Homo Sapiens
aagacaggggttaggcctc

SEQ ID NO: 55774 - DNA, 30 bp, Homo Sapiens; identical to SEQ ID NO: 8396

SEQ ID NO: 55775 - DNA, 29 bp, Homo Sapiens
tcagaaggctgcgtgttcgaatcacgtcg

SEQ ID NO: 55776 - DNA, 28 bp, Homo Sapiens
cgcggcccgggttcgattcccggtcagg

SEQ ID NO: 55777 - DNA, 27 bp, Homo Sapiens
atgttggttatacccttcccgtactac

SEQ ID NO: 55778 - DNA, 22 bp, Homo Sapiens
tatccattggtcttaggcccca

SEQ ID NO: 55779 - DNA, 26 bp, Homo Sapiens
gctctcaccgccgcggcccgggttcg

SEQ ID NO: 55780 - DNA, 24 bp, Homo Sapiens
ggttcaattcctcttcttaacacc

SEQ ID NO: 55781 - DNA, 23 bp, Homo Sapiens
gccacgcgggaggcccgggttcg

SEQ ID NO: 55782 - DNA, 20 bp, Homo Sapiens
gctttgcacgtatgaggccc

SEQ ID NO: 55783 - DNA, 18 bp, Homo Sapiens
catttcgatggcgtgggt

SEQ ID NO: 55784 - DNA, 25 bp, Homo Sapiens
ggggttcgattccttccttttttgc

SEQ ID NO: 55785 - DNA, 21 bp, Homo Sapiens
gctaaatcctatatatcttac

SEQ ID NO: 55786 - DNA, 25 bp, Homo Sapiens
cgctggttcgaatccggctcggagg

SEQ ID NO: 55787 - DNA, 22 bp, Homo Sapiens
gacaacattcaaaaaagagtac

SEQ ID NO: 55788 - DNA, 36 bp, Homo Sapiens; identical to SEQ ID NO: 23714

SEQ ID NO: 55789 - DNA, 27 bp, Homo Sapiens
aactttgtcaaagttaaattataggct

SEQ ID NO: 55790 - DNA, 16 bp, Homo Sapiens
aatacagaccaagagc

SEQ ID NO: 55791 - DNA, 16 bp, Homo Sapiens
acccccttatttctac

SEQ ID NO: 55792 - DNA, 17 bp, Homo Sapiens
caagtccctgttcgggc

SEQ ID NO: 55793 - DNA, 20 bp, Homo Sapiens
ttaaagattaagagaaccaa

SEQ ID NO: 55794 - DNA, 16 bp, Homo Sapiens
aggtcagctaaataag

SEQ ID NO: 55795 - DNA, 17 bp, Homo Sapiens
ttgcgttcagttgatgc

SEQ ID NO: 55796 - DNA, 19 bp, Homo Sapiens
ctcataatctgaaggtcct

SEQ ID NO: 55797 - DNA, 29 bp, Homo Sapiens
agattaagagaaccaacacctctttacag

SEQ ID NO: 55798 - DNA, 16 bp, Homo Sapiens
gttatacccttcccgt

SEQ ID NO: 55799 - DNA, 19 bp, Homo Sapiens
gggtggttcagtggtagaa

SEQ ID NO: 55800 - DNA, 45 bp, Homo Sapiens; identical to SEQ ID NO: 9933

SEQ ID NO: 55801 - DNA, 34 bp, Homo Sapiens; identical to SEQ ID NO: 24475

SEQ ID NO: 55802 - DNA, 27 bp, Homo Sapiens
gtgggtttaagtcccattggtctagcc

SEQ ID NO: 55803 - DNA, 34 bp, Homo Sapiens; identical to SEQ ID NO: 15099

SEQ ID NO: 55804 - DNA, 41 bp, Homo Sapiens; identical to SEQ ID NO: 13160

SEQ ID NO: 55805 - DNA, 34 bp, Homo Sapiens; identical to SEQ ID NO: 4152

SEQ ID NO: 55806 - DNA, 35 bp, Homo Sapiens; identical to SEQ ID NO: 8271

SEQ ID NO: 55807 - DNA, 30 bp, Homo Sapiens; identical to SEQ ID NO: 10569

SEQ ID NO: 55808 - DNA, 16 bp, Homo Sapiens
ttcccattcttgcgac

SEQ ID NO: 55809 - DNA, 25 bp, Homo Sapiens
atgggttcgattctcatagtcctag

SEQ ID NO: 55810 - DNA, 46 bp, Homo Sapiens; identical to SEQ ID NO: 17029

SEQ ID NO: 55811 - DNA, 28 bp, Homo Sapiens
agaggcttacgaccccttatttacccca

SEQ ID NO: 55812 - DNA, 22 bp, Homo Sapiens
ttaggattcggcgctctcaccg

SEQ ID NO: 55813 - DNA, 34 bp, Homo Sapiens; identical to SEQ ID NO: 8369

SEQ ID NO: 55814 - DNA, 26 bp, Homo Sapiens
tgtgggttcgagtcccatctggggtg

SEQ ID NO: 55815 - DNA, 33 bp, Homo Sapiens; identical to SEQ ID NO: 18725

SEQ ID NO: 55816 - DNA, 33 bp, Homo Sapiens; identical to SEQ ID NO: 11011

SEQ ID NO: 55817 - DNA, 39 bp, Homo Sapiens; identical to SEQ ID NO: 1012

SEQ ID NO: 55818 - DNA, 23 bp, Homo Sapiens
gttcgaatccgagtcacggcacc

SEQ ID NO: 55819 - DNA, 26 bp, Homo Sapiens
tgtctaacaacatggctttctcacca

SEQ ID NO: 55820 - DNA, 20 bp, Homo Sapiens
aggattcggcgctctcaccg

SEQ ID NO: 55821 - DNA, 26 bp, Homo Sapiens
agtcggtagagcatgagactcttaat

SEQ ID NO: 55822 - DNA, 22 bp, Homo Sapiens
agtctcataatctgaaggtcgt

SEQ ID NO: 55823 - DNA, 29 bp, Homo Sapiens
ttcatatcattggtcgtggttgtagtccg

SEQ ID NO: 55824 - DNA, 18 bp, Homo Sapiens
ttgtaaaccaggggtcgc

SEQ ID NO: 55825 - DNA, 29 bp, Homo Sapiens
ttggtggttcgatcccacccagggacgcc

SEQ ID NO: 55826 - DNA, 16 bp, Homo Sapiens
agcagttgacccgggt

SEQ ID NO: 55827 - DNA, 34 bp, Homo Sapiens; identical to SEQ ID NO: 2160

SEQ ID NO: 55828 - DNA, 37 bp, Homo Sapiens; identical to SEQ ID NO: 31109

SEQ ID NO: 55829 - DNA, 25 bp, Homo Sapiens
ctcagtcggtagagcatcagacttt

SEQ ID NO: 55830 - DNA, 16 bp, Homo Sapiens
gttccatagtgtagcg

SEQ ID NO: 55831 - DNA, 18 bp, Homo Sapiens
ctgcgtgttcgaatcacg

SEQ ID NO: 55832 - DNA, 21 bp, Homo Sapiens
tggggttttgcagtccttacc

SEQ ID NO: 55833 - DNA, 29 bp, Homo Sapiens
tgcgacccgggttcgattcccgggcggcg

SEQ ID NO: 55834 - DNA, 23 bp, Homo Sapiens
gttcaattcctcttcttaacacc

SEQ ID NO: 55835 - DNA, 19 bp, Homo Sapiens
cttaaacccccttatttct

SEQ ID NO: 55836 - DNA, 19 bp, Homo Sapiens
gggtatgattctcgcttcg

SEQ ID NO: 55837 - DNA, 18 bp, Homo Sapiens
gttcgattcccggccaat

SEQ ID NO: 55838 - DNA, 24 bp, Homo Sapiens
tggtctagtggctaggattcggcg

SEQ ID NO: 55839 - DNA, 27 bp, Homo Sapiens
cgctctcaccgccgcggcccgggttcg

SEQ ID NO: 55840 - DNA, 21 bp, Homo Sapiens
ctcagggatgggttcgattct

SEQ ID NO: 55841 - DNA, 28 bp, Homo Sapiens
gggagaccggggttcgattccccgacgg

SEQ ID NO: 55842 - DNA, 23 bp, Homo Sapiens
tggttcgattccggctcgaagga

SEQ ID NO: 55843 - DNA, 24 bp, Homo Sapiens
ctcgttagtatagtggtgagtatc

SEQ ID NO: 55844 - DNA, 33 bp, Homo Sapiens; identical to SEQ ID NO: 18411

SEQ ID NO: 55845 - DNA, 17 bp, Homo Sapiens
atccgagtcacggcacc

SEQ ID NO: 55846 - DNA, 29 bp, Homo Sapiens
gctagctcagtcggtagagcatgagactc

SEQ ID NO: 55847 - DNA, 32 bp, Homo Sapiens; identical to SEQ ID NO: 19919

SEQ ID NO: 55848 - DNA, 16 bp, Homo Sapiens
agtgaagcattggact

SEQ ID NO: 55849 - DNA, 16 bp, Homo Sapiens
ctcagtcggtagagca

SEQ ID NO: 55850 - DNA, 16 bp, Homo Sapiens
atggataaggcactgg

SEQ ID NO: 55851 - DNA, 30 bp, Homo Sapiens; identical to SEQ ID NO: 23708

SEQ ID NO: 55852 - DNA, 23 bp, Homo Sapiens
agacgggctcacatcaccccata

SEQ ID NO: 55853 - DNA, 29 bp, Homo Sapiens
cgccgtgatcgtatagtggttagtactct

SEQ ID NO: 55854 - DNA, 18 bp, Homo Sapiens
atggaggccatggggttg

SEQ ID NO: 55855 - DNA, 20 bp, Homo Sapiens
gtctaggggtatgattctcg

SEQ ID NO: 55856 - DNA, 25 bp, Homo Sapiens
cagtcggtagagcatgagactctta

SEQ ID NO: 55857 - DNA, 18 bp, Homo Sapiens
cccaacttacacttagga

SEQ ID NO: 55858 - DNA, 21 bp, Homo Sapiens
agtggtagaattctcgcctcc

SEQ ID NO: 55859 - DNA, 19 bp, Homo Sapiens
gtctaacaacatggctttc

SEQ ID NO: 55860 - DNA, 16 bp, Homo Sapiens
gacaggggttaggcct

SEQ ID NO: 55861 - DNA, 43 bp, Homo Sapiens; identical to SEQ ID NO: 30593

SEQ ID NO: 55862 - DNA, 36 bp, Homo Sapiens; identical to SEQ ID NO: 14223

SEQ ID NO: 55863 - DNA, 34 bp, Homo Sapiens; identical to SEQ ID NO: 7600

SEQ ID NO: 55864 - DNA, 18 bp, Homo Sapiens
gcggttatcacgtctgct

SEQ ID NO: 55865 - DNA, 30 bp, Homo Sapiens; identical to SEQ ID NO: 7329

SEQ ID NO: 55866 - DNA, 40 bp, Homo Sapiens; identical to SEQ ID NO: 1078

SEQ ID NO: 55867 - DNA, 19 bp, Homo Sapiens
aagtcccattggtctagcc

SEQ ID NO: 55868 - DNA, 33 bp, Homo Sapiens; identical to SEQ ID NO: 16770

SEQ ID NO: 55869 - DNA, 46 bp, Homo Sapiens; identical to SEQ ID NO: 21734

SEQ ID NO: 55870 - DNA, 20 bp, Homo Sapiens
ggttcgagtcccggcggagt

SEQ ID NO: 55871 - DNA, 16 bp, Homo Sapiens
attcggcgctctcacc

SEQ ID NO: 55872 - DNA, 22 bp, Homo Sapiens
gactcaagttctggtctccgga

SEQ ID NO: 55873 - DNA, 22 bp, Homo Sapiens
tcaattcccggccaatgcacca

SEQ ID NO: 55874 - DNA, 30 bp, Homo Sapiens; identical to SEQ ID NO: 1852

SEQ ID NO: 55875 - DNA, 24 bp, Homo Sapiens
tacctcctcaaagcaatacactga

SEQ ID NO: 55876 - DNA, 16 bp, Homo Sapiens
tgtccgcgtgggttcg

SEQ ID NO: 55877 - DNA, 38 bp, Homo Sapiens; identical to SEQ ID NO: 1011

SEQ ID NO: 55878 - DNA, 22 bp, Homo Sapiens
gttcgaatccgagtcacggcac

SEQ ID NO: 55879 - DNA, 22 bp, Homo Sapiens
cggcccgggttcgattcccggt

SEQ ID NO: 55880 - DNA, 23 bp, Homo Sapiens
gttcgagtcccatctgggtcgcc

SEQ ID NO: 55881 - DNA, 25 bp, Homo Sapiens
tcggtagagcatgggactcttaatc

SEQ ID NO: 55882 - DNA, 32 bp, Homo Sapiens; identical to SEQ ID NO: 3157

SEQ ID NO: 55883 - DNA, 18 bp, Homo Sapiens
aatagtaccgttaacttc

SEQ ID NO: 55884 - DNA, 31 bp, Homo Sapiens; identical to SEQ ID NO: 12010

SEQ ID NO: 55885 - DNA, 18 bp, Homo Sapiens
gcaatggtggttcagtgg

SEQ ID NO: 55886 - DNA, 22 bp, Homo Sapiens
ttcgattcccggccaacgcacc

SEQ ID NO: 55887 - DNA, 29 bp, Homo Sapiens
gccgcggcccgggttcgattcccggtcag

SEQ ID NO: 55888 - DNA, 21 bp, Homo Sapiens
cagttgatgcagagtggggtt

SEQ ID NO: 55889 - DNA, 30 bp, Homo Sapiens; identical to SEQ ID NO: 3403

SEQ ID NO: 55890 - DNA, 25 bp, Homo Sapiens
aaagtcatggaggccatggggttgg

SEQ ID NO: 55891 - DNA, 26 bp, Homo Sapiens
tccattggggtttccccgcgcaggtt

SEQ ID NO: 55892 - DNA, 24 bp, Homo Sapiens
gctaatggtggagttaaagacttt

SEQ ID NO: 55893 - DNA, 28 bp, Homo Sapiens
aatggtggttcagtggtagaattctcgc

SEQ ID NO: 55894 - DNA, 35 bp, Homo Sapiens; identical to SEQ ID NO: 23713

SEQ ID NO: 55895 - DNA, 35 bp, Homo Sapiens; identical to SEQ ID NO: 22225

SEQ ID NO: 55896 - DNA, 27 bp, Homo Sapiens
aagaagcagcttcaaacctgccggggc

SEQ ID NO: 55897 - DNA, 22 bp, Homo Sapiens
atgtctaacaacatggctttct

SEQ ID NO: 55898 - DNA, 16 bp, Homo Sapiens
aaacatcagattgtga

SEQ ID NO: 55899 - DNA, 18 bp, Homo Sapiens
atcagattgtgaatctga

SEQ ID NO: 55900 - DNA, 19 bp, Homo Sapiens
aacacaaagcacccaactt

SEQ ID NO: 55901 - DNA, 17 bp, Homo Sapiens
tcaccgccgcggcccgg

SEQ ID NO: 55902 - DNA, 17 bp, Homo Sapiens
cttacctcctcaaagca

SEQ ID NO: 55903 - DNA, 47 bp, Homo Sapiens; identical to SEQ ID NO: 8800

SEQ ID NO: 55904 - DNA, 34 bp, Homo Sapiens; identical to SEQ ID NO: 15105

SEQ ID NO: 55905 - DNA, 40 bp, Homo Sapiens; identical to SEQ ID NO: 16647

SEQ ID NO: 55906 - DNA, 26 bp, Homo Sapiens
gtggttaggattcggcgctctcaccg

SEQ ID NO: 55907 - DNA, 26 bp, Homo Sapiens
gtaagttgcaatacttaatttctgcc

SEQ ID NO: 55908 - DNA, 37 bp, Homo Sapiens; identical to SEQ ID NO: 30078

SEQ ID NO: 55909 - DNA, 33 bp, Homo Sapiens; identical to SEQ ID NO: 2852

SEQ ID NO: 55910 - DNA, 24 bp, Homo Sapiens
aagttgcaatacttaatttctgcc

SEQ ID NO: 55911 - DNA, 26 bp, Homo Sapiens
aagctcacaagaactgctaactcatg

SEQ ID NO: 55912 - DNA, 35 bp, Homo Sapiens; identical to SEQ ID NO: 8370

SEQ ID NO: 55913 - DNA, 41 bp, Homo Sapiens; identical to SEQ ID NO: 23029

SEQ ID NO: 55914 - DNA, 31 bp, Homo Sapiens; identical to SEQ ID NO: 8306

SEQ ID NO: 55915 - DNA, 34 bp, Homo Sapiens; identical to SEQ ID NO: 13076

SEQ ID NO: 55916 - DNA, 41 bp, Homo Sapiens; identical to SEQ ID NO: 23001

SEQ ID NO: 55917 - DNA, 17 bp, Homo Sapiens
atcctatatatcttacc

SEQ ID NO: 55918 - DNA, 18 bp, Homo Sapiens
tcaaatcccggacgagcc

SEQ ID NO: 55919 - DNA, 22 bp, Homo Sapiens
gtggggttttgcagtccttacc

SEQ ID NO: 55920 - DNA, 19 bp, Homo Sapiens
cagaccaagagccttcaaa

SEQ ID NO: 55921 - DNA, 20 bp, Homo Sapiens
aggttcgaatcctgccgact

SEQ ID NO: 55922 - DNA, 19 bp, Homo Sapiens
tctaaaggtccctggttcg

SEQ ID NO: 55923 - DNA, 23 bp, Homo Sapiens
gtaatcgcataaaacttaaaact

SEQ ID NO: 55924 - DNA, 43 bp, Homo Sapiens; identical to SEQ ID NO: 15268

SEQ ID NO: 55925 - DNA, 17 bp, Homo Sapiens
tcccgggcggaaacacc

SEQ ID NO: 55926 - DNA, 16 bp, Homo Sapiens
gttatcacgtctgctt

SEQ ID NO: 55927 - DNA, 17 bp, Homo Sapiens
gctagctcagtcggtag

SEQ ID NO: 55928 - DNA, 21 bp, Homo Sapiens
tcaggatggccgagcggtcta

SEQ ID NO: 55929 - DNA, 24 bp, Homo Sapiens
cttaggagatttcaacttaacttg

SEQ ID NO: 55930 - DNA, 23 bp, Homo Sapiens
gtttaaccaaaacatcagattgt

SEQ ID NO: 55931 - DNA, 21 bp, Homo Sapiens
gtggtagagcatttgactgca

SEQ ID NO: 55932 - DNA, 23 bp, Homo Sapiens
catcagattgtgaatctgacaac

SEQ ID NO: 55933 - DNA, 25 bp, Homo Sapiens
aagcattggactgtaaatctaaaga

SEQ ID NO: 55934 - DNA, 34 bp, Homo Sapiens; identical to SEQ ID NO: 12013

SEQ ID NO: 55935 - DNA, 32 bp, Homo Sapiens; identical to SEQ ID NO: 12011

SEQ ID NO: 55936 - DNA, 32 bp, Homo Sapiens; identical to SEQ ID NO: 18195

SEQ ID NO: 55937 - DNA, 16 bp, Homo Sapiens
tctcatagtcctagcc

SEQ ID NO: 55938 - DNA, 32 bp, Homo Sapiens; identical to SEQ ID NO: 17583

SEQ ID NO: 55939 - DNA, 32 bp, Homo Sapiens; identical to SEQ ID NO: 8398

SEQ ID NO: 55940 - DNA, 40 bp, Homo Sapiens; identical to SEQ ID NO: 1732

SEQ ID NO: 55941 - DNA, 20 bp, Homo Sapiens
agactcaagttctggtctcc

SEQ ID NO: 55942 - DNA, 31 bp, Homo Sapiens; identical to SEQ ID NO: 10416

SEQ ID NO: 55943 - DNA, 24 bp, Homo Sapiens
aaagctcacaagaactgctaactc

SEQ ID NO: 55944 - DNA, 26 bp, Homo Sapiens
gcggcccgggttcgactcccggtgtg

SEQ ID NO: 55945 - DNA, 27 bp, Homo Sapiens
tgggttcgattctcatagtcctagcca

SEQ ID NO: 55946 - DNA, 29 bp, Homo Sapiens
gaaaaagtcatggaggccatggggttggc

SEQ ID NO: 55947 - DNA, 27 bp, Homo Sapiens
tagtgtagtggttatcacgtctgcttt

SEQ ID NO: 55948 - DNA, 17 bp, Homo Sapiens
actgggcggaaacacca

SEQ ID NO: 55949 - DNA, 24 bp, Homo Sapiens
agtgtagtggtcatcacgttcgcc

SEQ ID NO: 55950 - DNA, 29 bp, Homo Sapiens
ccatgtctaacaacatggctttctcacca

SEQ ID NO: 55951 - DNA, 18 bp, Homo Sapiens
ttcgattcccgggcggcg

SEQ ID NO: 55952 - DNA, 20 bp, Homo Sapiens
caacattcaaaaaagagtac

SEQ ID NO: 55953 - DNA, 23 bp, Homo Sapiens
gttcgattcccgggcggcgcacc

SEQ ID NO: 55954 - DNA, 19 bp, Homo Sapiens
gccctcttagcgcagcggg

SEQ ID NO: 55955 - DNA, 32 bp, Homo Sapiens; identical to SEQ ID NO: 26041

SEQ ID NO: 55956 - DNA, 23 bp, Homo Sapiens
cagcttcaaacctgccggggctt

SEQ ID NO: 55957 - DNA, 24 bp, Homo Sapiens
cagattgtgaatctgacaacagag

SEQ ID NO: 55958 - DNA, 18 bp, Homo Sapiens
gttcgaatcccactcctg

SEQ ID NO: 55959 - DNA, 24 bp, Homo Sapiens
gcggcccgggttcgattcccggtc

SEQ ID NO: 55960 - DNA, 17 bp, Homo Sapiens
accggagatgaaaacct

SEQ ID NO: 55961 - DNA, 34 bp, Homo Sapiens; identical to SEQ ID NO: 19282

SEQ ID NO: 55962 - DNA, 37 bp, Homo Sapiens; identical to SEQ ID NO: 22460

SEQ ID NO: 55963 - DNA, 29 bp, Homo Sapiens
agaaagctcacaagaactgctaactcatg

SEQ ID NO: 55964 - DNA, 35 bp, Homo Sapiens; identical to SEQ ID NO: 6892

SEQ ID NO: 55965 - DNA, 28 bp, Homo Sapiens
gaaagctcacaagaactgctaactcatg

SEQ ID NO: 55966 - DNA, 26 bp, Homo Sapiens
tgtgggttcgagtcccatctgggtcg

SEQ ID NO: 55967 - DNA, 31 bp, Homo Sapiens; identical to SEQ ID NO: 12560

SEQ ID NO: 55968 - DNA, 41 bp, Homo Sapiens; identical to SEQ ID NO: 25334

SEQ ID NO: 55969 - DNA, 27 bp, Homo Sapiens
gggagaccggggttcgattccccgacg

SEQ ID NO: 55970 - DNA, 17 bp, Homo Sapiens
acacgcagaaggtcctg

SEQ ID NO: 55971 - DNA, 19 bp, Homo Sapiens
taaaccgaagatcgcgggt

SEQ ID NO: 55972 - DNA, 29 bp, Homo Sapiens
cccgggttcaatccccggcacctccacca

SEQ ID NO: 55973 - DNA, 27 bp, Homo Sapiens
agtcggtagagcatcagacttttaatc

SEQ ID NO: 55974 - DNA, 29 bp, Homo Sapiens
aaggtcctgggttcgagccccagtggaac

SEQ ID NO: 55975 - DNA, 18 bp, Homo Sapiens
aaccaggcggaaacacca

SEQ ID NO: 55976 - DNA, 22 bp, Homo Sapiens
acaaaacgaatgatttcgactc

SEQ ID NO: 55977 - DNA, 24 bp, Homo Sapiens
accaaaacatcagattgtgaatct

SEQ ID NO: 55978 - DNA, 28 bp, Homo Sapiens
gcccccatgtctaacaacatggctttct

SEQ ID NO: 55979 - DNA, 23 bp, Homo Sapiens
acaaaacgaatgatttcgactca

SEQ ID NO: 55980 - DNA, 18 bp, Homo Sapiens
cccccatgtctaacaaca

SEQ ID NO: 55981 - DNA, 16 bp, Homo Sapiens
tccttccttttttgcc

SEQ ID NO: 55982 - DNA, 19 bp, Homo Sapiens
agcacccaacttacactta

SEQ ID NO: 55983 - DNA, 27 bp, Homo Sapiens
ccgaaaatgttggttatacccttcccg

SEQ ID NO: 55984 - DNA, 24 bp, Homo Sapiens
gaagcattggactgtaaatctaaa

SEQ ID NO: 55985 - DNA, 39 bp, Homo Sapiens; identical to SEQ ID NO: 3227

SEQ ID NO: 55986 - DNA, 23 bp, Homo Sapiens
gggttcgattctcatagtcctag

SEQ ID NO: 55987 - DNA, 27 bp, Homo Sapiens
aaagctcacaagaactgctaactcatg

SEQ ID NO: 55988 - DNA, 26 bp, Homo Sapiens
gctggtgtagtggtatcatgcaagat

SEQ ID NO: 55989 - DNA, 26 bp, Homo Sapiens
tgggttcgattctcatagtcctagcc

SEQ ID NO: 55990 - DNA, 22 bp, Homo Sapiens
cccattcttgcgacccgggttc

SEQ ID NO: 55991 - DNA, 23 bp, Homo Sapiens
aggcttacgaccccttatttacc

SEQ ID NO: 55992 - DNA, 25 bp, Homo Sapiens
ggagaccggggttcgattccccgac

SEQ ID NO: 55993 - DNA, 29 bp, Homo Sapiens
atggtggttcagtggtagaattctcgcct

SEQ ID NO: 55994 - DNA, 19 bp, Homo Sapiens
gttcgattcccggccaatg

SEQ ID NO: 55995 - DNA, 19 bp, Homo Sapiens
gactttgaatccagcgatc

SEQ ID NO: 55996 - DNA, 25 bp, Homo Sapiens
gctcagtcggtagagcatgagactc

SEQ ID NO: 55997 - DNA, 22 bp, Homo Sapiens
gtggttatcacgttcgcctcac

SEQ ID NO: 55998 - DNA, 16 bp, Homo Sapiens
atctcggtgggacctc

SEQ ID NO: 55999 - DNA, 47 bp, Homo Sapiens; identical to SEQ ID NO: 17151

SEQ ID NO: 56000 - DNA, 20 bp, Homo Sapiens
cgactcccggtgtgggaacc

SEQ ID NO: 56001 - DNA, 24 bp, Homo Sapiens
ggttcgactcctggctggctcgcc

SEQ ID NO: 56002 - DNA, 37 bp, Homo Sapiens; identical to SEQ ID NO: 24955

SEQ ID NO: 56003 - DNA, 21 bp, Homo Sapiens
cgtagtcgtggccgagtggtt

SEQ ID NO: 56004 - DNA, 23 bp, Homo Sapiens
gttcgattcccggccaacgcacc

SEQ ID NO: 56005 - DNA, 22 bp, Homo Sapiens
ttcgagtctcggtggaacctcc

SEQ ID NO: 56006 - DNA, 23 bp, Homo Sapiens
tagtggctaggattcggcgcttt

SEQ ID NO: 56007 - DNA, 17 bp, Homo Sapiens
gcagcaacctcggttcg

SEQ ID NO: 56008 - DNA, 21 bp, Homo Sapiens
gctttggggggttcgattcct

SEQ ID NO: 56009 - DNA, 24 bp, Homo Sapiens
tagtggttagtatccccgcctgtc

SEQ ID NO: 56010 - DNA, 43 bp, Homo Sapiens; identical to SEQ ID NO: 19903

SEQ ID NO: 56011 - DNA, 19 bp, Homo Sapiens
tcgaatccggctcgaagga

SEQ ID NO: 56012 - DNA, 19 bp, Homo Sapiens
cccattcttgcgacccggg

SEQ ID NO: 56013 - DNA, 25 bp, Homo Sapiens
ggtagaattctcgcctgccacgcgg

SEQ ID NO: 56014 - DNA, 20 bp, Homo Sapiens
aggtcctgggttcgagcccc

SEQ ID NO: 56015 - DNA, 19 bp, Homo Sapiens
cataatctgaaggtcctga

SEQ ID NO: 56016 - DNA, 41 bp, Homo Sapiens; identical to SEQ ID NO: 23366

SEQ ID NO: 56017 - DNA, 31 bp, Homo Sapiens; identical to SEQ ID NO: 10702

SEQ ID NO: 56018 - DNA, 40 bp, Homo Sapiens; identical to SEQ ID NO: 30354

SEQ ID NO: 56019 - DNA, 43 bp, Homo Sapiens; identical to SEQ ID NO: 22551

SEQ ID NO: 56020 - DNA, 28 bp, Homo Sapiens
cggatagctcagtcggtagagcatcaga

SEQ ID NO: 56021 - DNA, 23 bp, Homo Sapiens
gtaaataataggagcttaaaccc

SEQ ID NO: 56022 - DNA, 16 bp, Homo Sapiens
tccgtggcgcaatgga

SEQ ID NO: 56023 - DNA, 21 bp, Homo Sapiens
taggattcggcgctctcaccg

SEQ ID NO: 56024 - DNA, 32 bp, Homo Sapiens; identical to SEQ ID NO: 9804

SEQ ID NO: 56025 - DNA, 16 bp, Homo Sapiens
ccagtggcctaatgga

SEQ ID NO: 56026 - DNA, 16 bp, Homo Sapiens
ttttgcagtccttacc

SEQ ID NO: 56027 - DNA, 25 bp, Homo Sapiens
agattgtgaatctgacaacagaggc

SEQ ID NO: 56028 - DNA, 20 bp, Homo Sapiens
catcagattgtgaatctgac

SEQ ID NO: 56029 - DNA, 26 bp, Homo Sapiens
caacttacacttaggagatttcaact

SEQ ID NO: 56030 - DNA, 19 bp, Homo Sapiens
ggtatagctcagtggtaga

SEQ ID NO: 56031 - DNA, 26 bp, Homo Sapiens
cacccaacttacacttaggagatttc

SEQ ID NO: 56032 - DNA, 44 bp, Homo Sapiens; identical to SEQ ID NO: 7610

SEQ ID NO: 56033 - DNA, 42 bp, Homo Sapiens; identical to SEQ ID NO: 14797

SEQ ID NO: 56034 - DNA, 28 bp, Homo Sapiens
ggatagctcagtcggtagagcatcagac

SEQ ID NO: 56035 - DNA, 16 bp, Homo Sapiens
tccttaggtcgctggt

SEQ ID NO: 56036 - DNA, 26 bp, Homo Sapiens
tggtgtagtggtatcatgcaagattc

SEQ ID NO: 56037 - DNA, 41 bp, Homo Sapiens; identical to SEQ ID NO: 23475

SEQ ID NO: 56038 - DNA, 22 bp, Homo Sapiens
ggggattagctcaaatggtaga

SEQ ID NO: 56039 - DNA, 16 bp, Homo Sapiens
acctctttacagtgac

SEQ ID NO: 56040 - DNA, 26 bp, Homo Sapiens
agctcagtcggtagagcatgagactc

SEQ ID NO: 56041 - DNA, 22 bp, Homo Sapiens
tagagcatgggactcttaatcc

SEQ ID NO: 56042 - DNA, 19 bp, Homo Sapiens
aacttacacttaggagatt

SEQ ID NO: 56043 - DNA, 33 bp, Homo Sapiens; identical to SEQ ID NO: 12012

SEQ ID NO: 56044 - DNA, 32 bp, Homo Sapiens; identical to SEQ ID NO: 22473

SEQ ID NO: 56045 - DNA, 47 bp, Homo Sapiens; identical to SEQ ID NO: 12145

SEQ ID NO: 56046 - DNA, 41 bp, Homo Sapiens; identical to SEQ ID NO: 23372

SEQ ID NO: 56047 - DNA, 29 bp, Homo Sapiens
atagctcagtcggtagagcatcagacttt

SEQ ID NO: 56048 - DNA, 21 bp, Homo Sapiens
taacagctatccattggtctt

SEQ ID NO: 56049 - DNA, 17 bp, Homo Sapiens
agcagagtggcgcagcg

SEQ ID NO: 56050 - DNA, 19 bp, Homo Sapiens
taaacccccttatttctac

SEQ ID NO: 56051 - DNA, 26 bp, Homo Sapiens
ttgactgcagatcaagaggtccccgg

SEQ ID NO: 56052 - DNA, 16 bp, Homo Sapiens
tcccattggtctagcc

SEQ ID NO: 56053 - DNA, 18 bp, Homo Sapiens
actcatgcccccatgtct

SEQ ID NO: 56054 - DNA, 18 bp, Homo Sapiens
aattttggtgcaactcca

SEQ ID NO: 56055 - DNA, 47 bp, Homo Sapiens; identical to SEQ ID NO: 10366

SEQ ID NO: 56056 - DNA, 18 bp, Homo Sapiens
gtggttatcacgtctgct

SEQ ID NO: 56057 - DNA, 23 bp, Homo Sapiens
aagctcacaagaactgctaactc

SEQ ID NO: 56058 - DNA, 17 bp, Homo Sapiens
gtatgattctcgctttg

SEQ ID NO: 56059 - DNA, 27 bp, Homo Sapiens
gcggcccgggttcgactcccggtgtgg

SEQ ID NO: 56060 - DNA, 27 bp, Homo Sapiens
ggtaatcgcataaaacttaaaacttta

SEQ ID NO: 56061 - DNA, 22 bp, Homo Sapiens
tttgcacgtatgaggccccggg

SEQ ID NO: 56062 - DNA, 34 bp, Homo Sapiens; identical to SEQ ID NO: 19921

SEQ ID NO: 56063 - DNA, 17 bp, Homo Sapiens
acgaatgatttcgactc

SEQ ID NO: 56064 - DNA, 23 bp, Homo Sapiens
gctcagtcggtagagcatgagac

SEQ ID NO: 56065 - DNA, 17 bp, Homo Sapiens
tgagtgaagcattggac

SEQ ID NO: 56066 - DNA, 19 bp, Homo Sapiens
gagaaccaacacctcttta

SEQ ID NO: 56067 - DNA, 16 bp, Homo Sapiens
ccagtggcgcaatgga

SEQ ID NO: 56068 - DNA, 20 bp, Homo Sapiens
ggttatcacattcgcctcac

SEQ ID NO: 56069 - DNA, 46 bp, Homo Sapiens; identical to SEQ ID NO: 9934

SEQ ID NO: 56070 - DNA, 28 bp, Homo Sapiens
cagaggcttacgaccccttatttacccc

SEQ ID NO: 56071 - DNA, 28 bp, Homo Sapiens
catggtctagcggttaggattcctggtt

SEQ ID NO: 56072 - DNA, 22 bp, Homo Sapiens
ttcgattctcatagtcctagcc

SEQ ID NO: 56073 - DNA, 16 bp, Homo Sapiens
gtcggtagagcatggg

SEQ ID NO: 56074 - DNA, 26 bp, Homo Sapiens
cagagtggggttttgcagtccttacc

SEQ ID NO: 56075 - DNA, 18 bp, Homo Sapiens
cgatcccgggtttcggca

SEQ ID NO: 56076 - DNA, 18 bp, Homo Sapiens
atacccttcccgtactac

SEQ ID NO: 56077 - DNA, 23 bp, Homo Sapiens
gttcgagtcccatctggggtgcc

SEQ ID NO: 56078 - DNA, 26 bp, Homo Sapiens
cgctctcaccgccgcggcccgggttc

SEQ ID NO: 56079 - DNA, 16 bp, Homo Sapiens
atcccaccctcgtcgc

SEQ ID NO: 56080 - DNA, 23 bp, Homo Sapiens
atggtttttcatatcattggtcg

SEQ ID NO: 56081 - DNA, 19 bp, Homo Sapiens
agaaatatgtctgataaaa

SEQ ID NO: 56082 - DNA, 25 bp, Homo Sapiens
gctagctcagtcggtagagcatgag

SEQ ID NO: 56083 - DNA, 21 bp, Homo Sapiens
ttctgtagtgtagtggttatc

SEQ ID NO: 56084 - DNA, 34 bp, Homo Sapiens; identical to SEQ ID NO: 950

SEQ ID NO: 56085 - DNA, 36 bp, Homo Sapiens; identical to SEQ ID NO: 8591

SEQ ID NO: 56086 - DNA, 24 bp, Homo Sapiens
ccggatagctcagtcggtagagca

SEQ ID NO: 56087 - DNA, 24 bp, Homo Sapiens
ggagcttaaacccccttatttcta

SEQ ID NO: 56088 - DNA, 19 bp, Homo Sapiens
gatgcagagtggggttttg

SEQ ID NO: 56089 - DNA, 18 bp, Homo Sapiens
tctcttcgggggcgtggg

SEQ ID NO: 56090 - DNA, 18 bp, Homo Sapiens
tcaaagcaatacactgaa

SEQ ID NO: 56091 - DNA, 23 bp, Homo Sapiens
ttaagttaaagattaagagaacc

SEQ ID NO: 56092 - DNA, 23 bp, Homo Sapiens
aaaatgttggttatacccttccc

SEQ ID NO: 56093 - DNA, 24 bp, Homo Sapiens
ctcttaatctcagggtcgtgggtt

SEQ ID NO: 56094 - DNA, 28 bp, Homo Sapiens
agtaagttgcaatacttaatttctgcca

SEQ ID NO: 56095 - DNA, 32 bp, Homo Sapiens; identical to SEQ ID NO: 18692

SEQ ID NO: 56096 - DNA, 43 bp, Homo Sapiens; identical to SEQ ID NO: 16650

SEQ ID NO: 56097 - DNA, 26 bp, Homo Sapiens
taagttgcaatacttaatttctgcca

SEQ ID NO: 56098 - DNA, 19 bp, Homo Sapiens
cggtagagcatgggactct

SEQ ID NO: 56099 - DNA, 37 bp, Homo Sapiens; identical to SEQ ID NO: 27924

SEQ ID NO: 56100 - DNA, 30 bp, Homo Sapiens; identical to SEQ ID NO: 23652

SEQ ID NO: 56101 - DNA, 16 bp, Homo Sapiens
ttcgattccccgacgg

SEQ ID NO: 56102 - DNA, 24 bp, Homo Sapiens
ggttcgaatcccaccgctgccacc

SEQ ID NO: 56103 - DNA, 18 bp, Homo Sapiens
tggtgagtatccccgcct

SEQ ID NO: 56104 - DNA, 16 bp, Homo Sapiens
ggtagagcatgggact

SEQ ID NO: 56105 - DNA, 18 bp, Homo Sapiens
aacacctctttacagtga

SEQ ID NO: 56106 - DNA, 28 bp, Homo Sapiens
gagatgaaaacctttttccaaggacacc

SEQ ID NO: 56107 - DNA, 34 bp, Homo Sapiens; identical to SEQ ID NO: 13078

SEQ ID NO: 56108 - DNA, 41 bp, Homo Sapiens; identical to SEQ ID NO: 28911

SEQ ID NO: 56109 - DNA, 28 bp, Homo Sapiens
agagaaccaacacctctttacagtgacc

SEQ ID NO: 56110 - DNA, 38 bp, Homo Sapiens; identical to SEQ ID NO: 8373

SEQ ID NO: 56111 - DNA, 31 bp, Homo Sapiens; identical to SEQ ID NO: 16402

SEQ ID NO: 56112 - DNA, 24 bp, Homo Sapiens
tgtctaacaacatggctttctcac

SEQ ID NO: 56113 - DNA, 25 bp, Homo Sapiens
aaccaaaacatcagattgtgaatct

SEQ ID NO: 56114 - DNA, 16 bp, Homo Sapiens
aagtgtttgtgggttt

SEQ ID NO: 56115 - DNA, 18 bp, Homo Sapiens
gagaaccaacacctcttt

SEQ ID NO: 56116 - DNA, 30 bp, Homo Sapiens; identical to SEQ ID NO: 13061

SEQ ID NO: 56117 - DNA, 34 bp, Homo Sapiens; identical to SEQ ID NO: 24011

SEQ ID NO: 56118 - DNA, 33 bp, Homo Sapiens; identical to SEQ ID NO: 18693

SEQ ID NO: 56119 - DNA, 35 bp, Homo Sapiens; identical to SEQ ID NO: 24012

SEQ ID NO: 56120 - DNA, 31 bp, Homo Sapiens; identical to SEQ ID NO: 16340

SEQ ID NO: 56121 - DNA, 28 bp, Homo Sapiens
gtggtctagtggttaggattcggcgctc

SEQ ID NO: 56122 - DNA, 30 bp, Homo Sapiens; identical to SEQ ID NO: 26928

SEQ ID NO: 56123 - DNA, 21 bp, Homo Sapiens
ttcacccaggcggcccgggtt

SEQ ID NO: 56124 - DNA, 35 bp, Homo Sapiens; identical to SEQ ID NO: 29265

SEQ ID NO: 56125 - DNA, 33 bp, Homo Sapiens; identical to SEQ ID NO: 18196

SEQ ID NO: 56126 - DNA, 33 bp, Homo Sapiens; identical to SEQ ID NO: 19364

SEQ ID NO: 56127 - DNA, 21 bp, Homo Sapiens
gacttaagatccaatggacat

SEQ ID NO: 56128 - DNA, 19 bp, Homo Sapiens
gttcgattcccggccaacg

SEQ ID NO: 56129 - DNA, 23 bp, Homo Sapiens
ggttcgattccggctcgaaggac

SEQ ID NO: 56130 - DNA, 27 bp, Homo Sapiens
cgttggtggtatagtggttagcatagc

SEQ ID NO: 56131 - DNA, 37 bp, Homo Sapiens; identical to SEQ ID NO: 3485

SEQ ID NO: 56132 - DNA, 34 bp, Homo Sapiens; identical to SEQ ID NO: 22537

SEQ ID NO: 56133 - DNA, 29 bp, Homo Sapiens
ataggagcttaaacccccttatttctacc

SEQ ID NO: 56134 - DNA, 20 bp, Homo Sapiens
aacattcaaaaaagagtacc

SEQ ID NO: 56135 - DNA, 17 bp, Homo Sapiens
ggtaatcgcataaaact

SEQ ID NO: 56136 - DNA, 22 bp, Homo Sapiens
gttcgatccccgtacgggccac

SEQ ID NO: 56137 - DNA, 31 bp, Homo Sapiens; identical to SEQ ID NO: 17336

SEQ ID NO: 56138 - DNA, 24 bp, Homo Sapiens
cgaaaatgttggttatacccttcc

SEQ ID NO: 56139 - DNA, 27 bp, Homo Sapiens
acaggggttaggcctctttttaccacc

SEQ ID NO: 56140 - DNA, 29 bp, Homo Sapiens
agccgtgatcgtatagtggttagtactct

SEQ ID NO: 56141 - DNA, 23 bp, Homo Sapiens
gactctgaatccagcgatccgag

SEQ ID NO: 56142 - DNA, 22 bp, Homo Sapiens
cttaggagatttcaacttaact

SEQ ID NO: 56143 - DNA, 29 bp, Homo Sapiens
cgtagtgtagtggttatcacgttcgcctc

SEQ ID NO: 56144 - DNA, 25 bp, Homo Sapiens
gggtttaagtcccattggtctagcc

SEQ ID NO: 56145 - DNA, 31 bp, Homo Sapiens; identical to SEQ ID NO: 17800

SEQ ID NO: 56146 - DNA, 22 bp, Homo Sapiens
gagcttaaacccccttatttct

SEQ ID NO: 56147 - DNA, 30 bp, Homo Sapiens; identical to SEQ ID NO: 24958

SEQ ID NO: 56148 - DNA, 32 bp, Homo Sapiens; identical to SEQ ID NO: 18449

SEQ ID NO: 56149 - DNA, 32 bp, Homo Sapiens; identical to SEQ ID NO: 17337

SEQ ID NO: 56150 - DNA, 32 bp, Homo Sapiens; identical to SEQ ID NO: 17360

SEQ ID NO: 56151 - DNA, 18 bp, Homo Sapiens
attggtggttcagtggta

SEQ ID NO: 56152 - DNA, 18 bp, Homo Sapiens
tgagtgaagcattggact

SEQ ID NO: 56153 - DNA, 16 bp, Homo Sapiens
cccacctggggtgcca

SEQ ID NO: 56154 - DNA, 19 bp, Homo Sapiens
aaacccccttatttctacc

SEQ ID NO: 56155 - DNA, 19 bp, Homo Sapiens
aacaacatggctttctcac

SEQ ID NO: 56156 - DNA, 25 bp, Homo Sapiens
gctctcaccgccgcggcccgggttc

SEQ ID NO: 56157 - DNA, 21 bp, Homo Sapiens
aatggtggagttaaagacttt

SEQ ID NO: 56158 - DNA, 25 bp, Homo Sapiens
tggttaggattcggcgctctcaccg

SEQ ID NO: 56159 - DNA, 16 bp, Homo Sapiens
ggattcggcgctctca

SEQ ID NO: 56160 - DNA, 17 bp, Homo Sapiens
cctcctcaaagcaatac

SEQ ID NO: 56161 - DNA, 23 bp, Homo Sapiens
aagcacccaacttacacttagga

SEQ ID NO: 56162 - DNA, 40 bp, Homo Sapiens; identical to SEQ ID NO: 27170

SEQ ID NO: 56163 - DNA, 27 bp, Homo Sapiens
agagaaccaacacctctttacagtgac

SEQ ID NO: 56164 - DNA, 24 bp, Homo Sapiens
gtccttgtagtataaactaataca

SEQ ID NO: 56165 - DNA, 16 bp, Homo Sapiens
ggttaggattcctggt

SEQ ID NO: 56166 - DNA, 20 bp, Homo Sapiens
tagtggttatcacgtctgct

SEQ ID NO: 56167 - DNA, 26 bp, Homo Sapiens
gggttcgattctcatagtcctagcca

SEQ ID NO: 56168 - DNA, 23 bp, Homo Sapiens
gtgagtatccccgcctgtcacgc

SEQ ID NO: 56169 - DNA, 18 bp, Homo Sapiens
cctcctcaaagcaataca

SEQ ID NO: 56170 - DNA, 25 bp, Homo Sapiens
acagctatccattggtcttaggccc

SEQ ID NO: 56171 - DNA, 28 bp, Homo Sapiens
gttaactaagtgtttgtgggtttaagtc

SEQ ID NO: 56172 - DNA, 35 bp, Homo Sapiens; identical to SEQ ID NO: 18284

SEQ ID NO: 56173 - DNA, 26 bp, Homo Sapiens
atagctcagtcggtagagcatcagac

SEQ ID NO: 56174 - DNA, 40 bp, Homo Sapiens; identical to SEQ ID NO: 25710

SEQ ID NO: 56175 - DNA, 22 bp, Homo Sapiens
ttcgactcctggctggctcgcc

SEQ ID NO: 56176 - DNA, 25 bp, Homo Sapiens
tgacaacattcaaaaaagagtacca

SEQ ID NO: 56177 - DNA, 20 bp, Homo Sapiens
taagtcccattggtctagcc

SEQ ID NO: 56178 - DNA, 19 bp, Homo Sapiens
tcgatcccgggtttcggca

SEQ ID NO: 56179 - DNA, 16 bp, Homo Sapiens
aatggataaggcactg

SEQ ID NO: 56180 - DNA, 34 bp, Homo Sapiens; identical to SEQ ID NO: 16634

SEQ ID NO: 56181 - DNA, 17 bp, Homo Sapiens
ggttatcacgtctgctt

SEQ ID NO: 56182 - DNA, 19 bp, Homo Sapiens
agtgggtagagcatcagac

SEQ ID NO: 56183 - DNA, 27 bp, Homo Sapiens
gcattggtggttcaatggtagaattct

SEQ ID NO: 56184 - DNA, 34 bp, Homo Sapiens; identical to SEQ ID NO: 16641

SEQ ID NO: 56185 - DNA, 34 bp, Homo Sapiens; identical to SEQ ID NO: 18756

SEQ ID NO: 56186 - DNA, 18 bp, Homo Sapiens
caatacttaatttctgcc

SEQ ID NO: 56187 - DNA, 25 bp, Homo Sapiens
tcgtggttgtagtccgtgcgagaat

SEQ ID NO: 56188 - DNA, 17 bp, Homo Sapiens
cgccgctggtgtagtgg

SEQ ID NO: 56189 - DNA, 20 bp, Homo Sapiens
gtttgtgggtttaagtccca

SEQ ID NO: 56190 - DNA, 16 bp, Homo Sapiens
ttcaaatcccggacga

SEQ ID NO: 56191 - DNA, 31 bp, Homo Sapiens; identical to SEQ ID NO: 30884

SEQ ID NO: 56192 - DNA, 17 bp, Homo Sapiens
tcttaatcccagggtcg

SEQ ID NO: 56193 - DNA, 24 bp, Homo Sapiens
ccctggtggtctagtggttaggat

SEQ ID NO: 56194 - DNA, 18 bp, Homo Sapiens
gaaagctcacaagaactg

SEQ ID NO: 56195 - DNA, 22 bp, Homo Sapiens
gttcgatcccgggtttcggcac

SEQ ID NO: 56196 - DNA, 19 bp, Homo Sapiens
aggattcggcgctctcacc

SEQ ID NO: 56197 - DNA, 25 bp, Homo Sapiens
ggttcgagtcctgccgcggtcgcca

SEQ ID NO: 56198 - DNA, 33 bp, Homo Sapiens; identical to SEQ ID NO: 16633

SEQ ID NO: 56199 - DNA, 16 bp, Homo Sapiens
agctcagtcggtagag

SEQ ID NO: 56200 - DNA, 17 bp, Homo Sapiens
gagtatccccgcctgtc

SEQ ID NO: 56201 - DNA, 20 bp, Homo Sapiens
accaggatggccgagtggtt

SEQ ID NO: 56202 - DNA, 31 bp, Homo Sapiens; identical to SEQ ID NO: 16631

SEQ ID NO: 56203 - DNA, 16 bp, Homo Sapiens
gaactgctaactcatg

SEQ ID NO: 56204 - DNA, 18 bp, Homo Sapiens
tggttcagtggtagaatt

SEQ ID NO: 56205 - DNA, 25 bp, Homo Sapiens
tagctcagtcggtagagcatcagac

SEQ ID NO: 56206 - DNA, 23 bp, Homo Sapiens
gttcaagtccctgttcgggcgcc

SEQ ID NO: 56207 - DNA, 20 bp, Homo Sapiens
gaccaagagccttcaaagcc

SEQ ID NO: 56208 - DNA, 22 bp, Homo Sapiens
actcatgcccccatgtctaaca

SEQ ID NO: 56209 - DNA, 22 bp, Homo Sapiens
ttcgatcccgggtttcggcacc

SEQ ID NO: 56210 - DNA, 18 bp, Homo Sapiens
gcgctctcaccgccgcgg

SEQ ID NO: 56211 - DNA, 24 bp, Homo Sapiens
ggttatcacgttcgcctcacacgc

SEQ ID NO: 56212 - DNA, 18 bp, Homo Sapiens
atcccactgctgccacca

SEQ ID NO: 56213 - DNA, 25 bp, Homo Sapiens
agtgtagtggtcatcacgttcgcct

SEQ ID NO: 56214 - DNA, 29 bp, Homo Sapiens
gagtggcgcagcggaagcgtgctgggccc

SEQ ID NO: 56215 - DNA, 20 bp, Homo Sapiens
tcaaatctcggtgggacctc

SEQ ID NO: 56216 - DNA, 21 bp, Homo Sapiens
atagtggtgagtatccccgcc

SEQ ID NO: 56217 - DNA, 25 bp, Homo Sapiens
ggagcttaaacccccttatttctac

SEQ ID NO: 56218 - DNA, 26 bp, Homo Sapiens
ccgaaaatgttggttatacccttccc

SEQ ID NO: 56219 - DNA, 30 bp, Homo Sapiens; identical to SEQ ID NO: 25126

SEQ ID NO: 56220 - DNA, 21 bp, Homo Sapiens
gtagtggttatcacgtctgct

SEQ ID NO: 56221 - DNA, 22 bp, Homo Sapiens
gctctcaccgccgcggcccggg

SEQ ID NO: 56222 - DNA, 30 bp, Homo Sapiens; identical to SEQ ID NO: 15062

SEQ ID NO: 56223 - DNA, 27 bp, Homo Sapiens
ggcggcccgggttcgactcccggtgtg

SEQ ID NO: 56224 - DNA, 21 bp, Homo Sapiens
tagctttgggtgctaatggtg

SEQ ID NO: 56225 - DNA, 18 bp, Homo Sapiens
atgggtggttcagtggta

SEQ ID NO: 56226 - DNA, 21 bp, Homo Sapiens
gtagaattctcgcctgccacg

SEQ ID NO: 56227 - DNA, 29 bp, Homo Sapiens
gcaacctcggttcgaatccgagtcacggc

SEQ ID NO: 56228 - DNA, 36 bp, Homo Sapiens; identical to SEQ ID NO: 16833

SEQ ID NO: 56229 - DNA, 21 bp, Homo Sapiens
tagtggttatcacgtctgctt

SEQ ID NO: 56230 - DNA, 22 bp, Homo Sapiens
tagtggttatcacgtctgcttt

SEQ ID NO: 56231 - DNA, 18 bp, Homo Sapiens
aggcctctttttaccacc

SEQ ID NO: 56232 - DNA, 22 bp, Homo Sapiens
agcttcaaacctgccggggctt

SEQ ID NO: 56233 - DNA, 18 bp, Homo Sapiens
aacccccttatttctacc

SEQ ID NO: 56234 - DNA, 20 bp, Homo Sapiens
gcctgtcacgcgggagaccg

SEQ ID NO: 56235 - DNA, 23 bp, Homo Sapiens
agcttcaaacctgccggggcttc

SEQ ID NO: 56236 - DNA, 30 bp, Homo Sapiens; identical to SEQ ID NO: 28883

SEQ ID NO: 56237 - DNA, 25 bp, Homo Sapiens
gggttcgattctcatagtcctagcc

SEQ ID NO: 56238 - DNA, 30 bp, Homo Sapiens; identical to SEQ ID NO: 24949

SEQ ID NO: 56239 - DNA, 20 bp, Homo Sapiens
tgtttagacgggctcacatc

SEQ ID NO: 56240 - DNA, 21 bp, Homo Sapiens
gttcgattccttccttttttg

SEQ ID NO: 56241 - DNA, 25 bp, Homo Sapiens
aagttgcaatacttaatttctgcca

SEQ ID NO: 56242 - DNA, 23 bp, Homo Sapiens
tagtactctgcgttgtggccgca

SEQ ID NO: 56243 - DNA, 22 bp, Homo Sapiens
ctcagtcggtagagcatgagac

SEQ ID NO: 56244 - DNA, 24 bp, Homo Sapiens
ggtctaggggtatgattctcgctt

SEQ ID NO: 56245 - DNA, 23 bp, Homo Sapiens
gaaaacctttttccaaggacacc

SEQ ID NO: 56246 - DNA, 30 bp, Homo Sapiens; identical to SEQ ID NO: 130

SEQ ID NO: 56247 - DNA, 20 bp, Homo Sapiens
gctttggggggttcgattcc

SEQ ID NO: 56248 - DNA, 19 bp, Homo Sapiens
gaaccaacacctctttaca

SEQ ID NO: 56249 - DNA, 24 bp, Homo Sapiens
aaccaacacctctttacagtgacc

SEQ ID NO: 56250 - DNA, 35 bp, Homo Sapiens; identical to SEQ ID NO: 10909

SEQ ID NO: 56251 - DNA, 20 bp, Homo Sapiens
gagtggggttttgcagtcct

SEQ ID NO: 56252 - DNA, 28 bp, Homo Sapiens
tcatatcattggtcgtggttgtagtccg

SEQ ID NO: 56253 - DNA, 21 bp, Homo Sapiens
ggttccatagtgtagtggtta

SEQ ID NO: 56254 - DNA, 40 bp, Homo Sapiens; identical to SEQ ID NO: 809

SEQ ID NO: 56255 - DNA, 30 bp, Homo Sapiens; identical to SEQ ID NO: 26847

SEQ ID NO: 56256 - DNA, 18 bp, Homo Sapiens
acgaatgatttcgactca

SEQ ID NO: 56257 - DNA, 29 bp, Homo Sapiens
cagaggcttacgaccccttatttacccca

SEQ ID NO: 56258 - DNA, 40 bp, Homo Sapiens; identical to SEQ ID NO: 214

SEQ ID NO: 56259 - DNA, 35 bp, Homo Sapiens; identical to SEQ ID NO: 29170

SEQ ID NO: 56260 - DNA, 23 bp, Homo Sapiens
tcagtcggtagagcatgagactc

SEQ ID NO: 56261 - DNA, 41 bp, Homo Sapiens; identical to SEQ ID NO: 215

SEQ ID NO: 56262 - DNA, 23 bp, Homo Sapiens
tgctaatggtggagttaaagact

SEQ ID NO: 56263 - DNA, 22 bp, Homo Sapiens
gaaagctcacaagaactgctaa

SEQ ID NO: 56264 - DNA, 23 bp, Homo Sapiens
aactcatgcccccatgtctaaca

SEQ ID NO: 56265 - DNA, 17 bp, Homo Sapiens
ggcctctttttaccacc

SEQ ID NO: 56266 - DNA, 20 bp, Homo Sapiens
gataatcatatttaccaacc

SEQ ID NO: 56267 - DNA, 30 bp, Homo Sapiens; identical to SEQ ID NO: 8183

SEQ ID NO: 56268 - DNA, 17 bp, Homo Sapiens
aatggtaagcactctgg

SEQ ID NO: 56269 - DNA, 35 bp, Homo Sapiens; identical to SEQ ID NO: 27659

SEQ ID NO: 56270 - DNA, 17 bp, Homo Sapiens
acccttcccgtactacc

SEQ ID NO: 56271 - DNA, 25 bp, Homo Sapiens
gaggcttacgaccccttatttaccc

SEQ ID NO: 56272 - DNA, 29 bp, Homo Sapiens
acagaggcttacgaccccttatttacccc

SEQ ID NO: 56273 - DNA, 37 bp, Homo Sapiens; identical to SEQ ID NO: 24478

SEQ ID NO: 56274 - DNA, 19 bp, Homo Sapiens
tcaaatcccggacgagccc

SEQ ID NO: 56275 - DNA, 24 bp, Homo Sapiens
tgggttcgattctcatagtcctag

SEQ ID NO: 56276 - DNA, 34 bp, Homo Sapiens; identical to SEQ ID NO: 17431

SEQ ID NO: 56277 - DNA, 38 bp, Homo Sapiens; identical to SEQ ID NO: 19700

SEQ ID NO: 56278 - DNA, 22 bp, Homo Sapiens
tcaattctcgctggggcctcca

SEQ ID NO: 56279 - DNA, 19 bp, Homo Sapiens
gtggttatcacgtctgctt

SEQ ID NO: 56280 - DNA, 26 bp, Homo Sapiens
cgccgctggtgtagtggtatcatgca

SEQ ID NO: 56281 - DNA, 27 bp, Homo Sapiens
ctgctaactcatgcccccatgtctaac

SEQ ID NO: 56282 - DNA, 16 bp, Homo Sapiens
atccggctcggaggac

SEQ ID NO: 56283 - DNA, 38 bp, Homo Sapiens; identical to SEQ ID NO: 6216

SEQ ID NO: 56284 - DNA, 27 bp, Homo Sapiens
gtaagttgcaatacttaatttctgcca

SEQ ID NO: 56285 - DNA, 23 bp, Homo Sapiens
gttcaattccccgacggggagcc

SEQ ID NO: 56286 - DNA, 19 bp, Homo Sapiens
taggcctctttttaccacc

SEQ ID NO: 56287 - DNA, 22 bp, Homo Sapiens
ggttcgactcctggctggctcg

SEQ ID NO: 56288 - DNA, 23 bp, Homo Sapiens
gttcgagccccagtggaaccacc

SEQ ID NO: 56289 - DNA, 25 bp, Homo Sapiens
ggttcgaatcccactcctgacacca

SEQ ID NO: 56290 - DNA, 16 bp, Homo Sapiens
ttcgactcccggtatg

SEQ ID NO: 56291 - DNA, 23 bp, Homo Sapiens
tggtgtagtggtatcatgcaaga

SEQ ID NO: 56292 - DNA, 19 bp, Homo Sapiens
ggttaggcctctttttacc

SEQ ID NO: 56293 - DNA, 25 bp, Homo Sapiens
cggtagagcatgggactcttaatcc

SEQ ID NO: 56294 - DNA, 28 bp, Homo Sapiens
gacaggggttaggcctctttttaccacc

SEQ ID NO: 56295 - DNA, 38 bp, Homo Sapiens; identical to SEQ ID NO: 16645

SEQ ID NO: 56296 - DNA, 17 bp, Homo Sapiens
taggatggggtgtgata

SEQ ID NO: 56297 - DNA, 20 bp, Homo Sapiens
cgattctcatagtcctagcc

SEQ ID NO: 56298 - DNA, 28 bp, Homo Sapiens
cgtagtgtagtggttatcacgttcgcct

SEQ ID NO: 56299 - DNA, 25 bp, Homo Sapiens
agccgtgatcgtatagtggttagta

SEQ ID NO: 56300 - DNA, 22 bp, Homo Sapiens
gttgatgcagagtggggttttg

SEQ ID NO: 56301 - DNA, 22 bp, Homo Sapiens
aagattaagagaaccaacacct

SEQ ID NO: 56302 - DNA, 41 bp, Homo Sapiens; identical to SEQ ID NO: 16858

SEQ ID NO: 56303 - DNA, 18 bp, Homo Sapiens
acacctctttacagtgac

SEQ ID NO: 56304 - DNA, 17 bp, Homo Sapiens
cttaggtcgctggttcg

SEQ ID NO: 56305 - DNA, 22 bp, Homo Sapiens
gacgggctcacatcaccccata

SEQ ID NO: 56306 - DNA, 38 bp, Homo Sapiens; identical to SEQ ID NO: 24479

SEQ ID NO: 56307 - DNA, 22 bp, Homo Sapiens
ttcgattccggctcgaaggacc

SEQ ID NO: 56308 - DNA, 20 bp, Homo Sapiens
catgggtggttcagtggtag

SEQ ID NO: 56309 - DNA, 34 bp, Homo Sapiens; identical to SEQ ID NO: 19935

SEQ ID NO: 56310 - DNA, 47 bp, Homo Sapiens; identical to SEQ ID NO: 9935

SEQ ID NO: 56311 - DNA, 19 bp, Homo Sapiens
gcggttatcacgtctgctt

SEQ ID NO: 56312 - DNA, 34 bp, Homo Sapiens; identical to SEQ ID NO: 16563

SEQ ID NO: 56313 - DNA, 21 bp, Homo Sapiens
tcgaatcacgtcggggtcacc

SEQ ID NO: 56314 - DNA, 20 bp, Homo Sapiens
cacaagaactgctaactcat

SEQ ID NO: 56315 - DNA, 35 bp, Homo Sapiens; identical to SEQ ID NO: 20368

SEQ ID NO: 56316 - DNA, 27 bp, Homo Sapiens
catggtgtaatggttagcactctggac

SEQ ID NO: 56317 - DNA, 29 bp, Homo Sapiens
ttttcatatcattggtcgtggttgtagtc

SEQ ID NO: 56318 - DNA, 25 bp, Homo Sapiens
ggttagcactctggactttgaatcc

SEQ ID NO: 56319 - DNA, 18 bp, Homo Sapiens
gttaactaagtgtttgtg

SEQ ID NO: 56320 - DNA, 23 bp, Homo Sapiens
gtagcgtggccgagcggtctaag

SEQ ID NO: 56321 - DNA, 26 bp, Homo Sapiens
aagaactgctaactcatgcccccatg

SEQ ID NO: 56322 - DNA, 25 bp, Homo Sapiens
gcccccatgtctaacaacatggctt

SEQ ID NO: 56323 - DNA, 17 bp, Homo Sapiens
caaagcaatacactgaa

SEQ ID NO: 56324 - DNA, 27 bp, Homo Sapiens
tccctggtggtctagtggctaggattc

SEQ ID NO: 56325 - DNA, 20 bp, Homo Sapiens
gatcgaaaccatcctctgct

SEQ ID NO: 56326 - DNA, 24 bp, Homo Sapiens
ggcttacgaccccttatttacccc

SEQ ID NO: 56327 - DNA, 19 bp, Homo Sapiens
gattccccgacggggagcc

SEQ ID NO: 56328 - DNA, 27 bp, Homo Sapiens
ttcatatcattggtcgtggttgtagtc

SEQ ID NO: 56329 - DNA, 17 bp, Homo Sapiens
ttcctcttcttaacacc

SEQ ID NO: 56330 - DNA, 34 bp, Homo Sapiens; identical to SEQ ID NO: 9767

SEQ ID NO: 56331 - DNA, 21 bp, Homo Sapiens
aacattcaaaaaagagtacca

SEQ ID NO: 56332 - DNA, 21 bp, Homo Sapiens
gttcgatcccgggtttcggca

SEQ ID NO: 56333 - DNA, 17 bp, Homo Sapiens
gagtgaagcattggact

SEQ ID NO: 56334 - DNA, 23 bp, Homo Sapiens
ttcgattctcatagtcctagcca

SEQ ID NO: 56335 - DNA, 27 bp, Homo Sapiens
tggtctagtggttaggattcggcgctc

SEQ ID NO: 56336 - DNA, 17 bp, Homo Sapiens
gtatgattctcggtttg

SEQ ID NO: 56337 - DNA, 30 bp, Homo Sapiens; identical to SEQ ID NO: 16459

SEQ ID NO: 56338 - DNA, 29 bp, Homo Sapiens
tcgtatagtggttagtactctgcgttgtg

SEQ ID NO: 56339 - DNA, 30 bp, Homo Sapiens; identical to SEQ ID NO: 25843

SEQ ID NO: 56340 - DNA, 34 bp, Homo Sapiens; identical to SEQ ID NO: 16851

SEQ ID NO: 56341 - DNA, 21 bp, Homo Sapiens
ttaagtcccattggtctagcc

SEQ ID NO: 56342 - DNA, 28 bp, Homo Sapiens
acatggtctagcggttaggattcctggt

SEQ ID NO: 56343 - DNA, 16 bp, Homo Sapiens
cgcgtggcctaatgga

SEQ ID NO: 56344 - DNA, 16 bp, Homo Sapiens
atcccggacgagcccc

SEQ ID NO: 56345 - DNA, 20 bp, Homo Sapiens
aaagacaggggttaggcctc

SEQ ID NO: 56346 - DNA, 18 bp, Homo Sapiens
ttccaagcagttgacccg

SEQ ID NO: 56347 - DNA, 17 bp, Homo Sapiens
gttcgattcccggtcag

SEQ ID NO: 56348 - DNA, 17 bp, Homo Sapiens
ccttcgatagctcagct

SEQ ID NO: 56349 - DNA, 16 bp, Homo Sapiens
attctcgcctgccacg

SEQ ID NO: 56350 - DNA, 18 bp, Homo Sapiens
tcaaacctgccggggctt

SEQ ID NO: 56351 - DNA, 34 bp, Homo Sapiens; identical to SEQ ID NO: 6212

SEQ ID NO: 56352 - DNA, 27 bp, Homo Sapiens
gttcttgtagttgaaatacaacgatgg

SEQ ID NO: 56353 - DNA, 21 bp, Homo Sapiens
gcgttggtggtatagtggtta

SEQ ID NO: 56354 - DNA, 24 bp, Homo Sapiens
agcagagtggcgcagcggaagcgt

SEQ ID NO: 56355 - DNA, 26 bp, Homo Sapiens
tccctggtggtctagtggctaggatt

SEQ ID NO: 56356 - DNA, 29 bp, Homo Sapiens
acatggtctagcggttaggattcctggtt

SEQ ID NO: 56357 - DNA, 23 bp, Homo Sapiens
attagggtgcttagctgttaact

SEQ ID NO: 56358 - DNA, 30 bp, Homo Sapiens; identical to SEQ ID NO: 10904

SEQ ID NO: 56359 - DNA, 26 bp, Homo Sapiens
cttttaagttaaagattaagagaacc

SEQ ID NO: 56360 - DNA, 23 bp, Homo Sapiens
caacttacacttaggagatttca

SEQ ID NO: 56361 - DNA, 20 bp, Homo Sapiens
gttaactaagtgtttgtggg

SEQ ID NO: 56362 - DNA, 35 bp, Homo Sapiens; identical to SEQ ID NO: 16852

SEQ ID NO: 56363 - DNA, 26 bp, Homo Sapiens
gttggttatacccttcccgtactacc

SEQ ID NO: 56364 - DNA, 24 bp, Homo Sapiens
ggttcaattccccgacggggagcc

SEQ ID NO: 56365 - DNA, 19 bp, Homo Sapiens
tcaaacctgccggggcttc

SEQ ID NO: 56366 - DNA, 17 bp, Homo Sapiens
cgtagtcgtggccgagt

SEQ ID NO: 56367 - DNA, 24 bp, Homo Sapiens
gttcgaatcccacttctgacacca

SEQ ID NO: 56368 - DNA, 18 bp, Homo Sapiens
gtctcttcgggggcgtgg

SEQ ID NO: 56369 - DNA, 23 bp, Homo Sapiens
gtcacggtggccgagtggttaag

SEQ ID NO: 56370 - DNA, 20 bp, Homo Sapiens
gctgagtgaagcattggact

SEQ ID NO: 56371 - DNA, 19 bp, Homo Sapiens
ggtggagttaaagactttt

SEQ ID NO: 56372 - DNA, 20 bp, Homo Sapiens
tggtgagtatccccgcctgt

SEQ ID NO: 56373 - DNA, 18 bp, Homo Sapiens
atagctcagtcggtagag

SEQ ID NO: 56374 - DNA, 28 bp, Homo Sapiens
acaggggttaggcctctttttaccacca

SEQ ID NO: 56375 - DNA, 26 bp, Homo Sapiens
gatgaaaacctttttccaaggacacc

SEQ ID NO: 56376 - DNA, 24 bp, Homo Sapiens
agcttaaacccccttatttctacc

SEQ ID NO: 56377 - DNA, 25 bp, Homo Sapiens
aaccaacacctctttacagtgacca

SEQ ID NO: 56378 - DNA, 30 bp, Homo Sapiens; identical to SEQ ID NO: 12222

SEQ ID NO: 56379 - DNA, 28 bp, Homo Sapiens
acttaggagatttcaacttaacttgacc

SEQ ID NO: 56380 - DNA, 23 bp, Homo Sapiens
agttgcaatacttaatttctgcc

SEQ ID NO: 56381 - DNA, 27 bp, Homo Sapiens
tggttagcactctggactttgaatcca

SEQ ID NO: 56382 - DNA, 19 bp, Homo Sapiens
gctagctcagtcggtagag

SEQ ID NO: 56383 - DNA, 28 bp, Homo Sapiens
gttagcactctggactctgaatccagcg

SEQ ID NO: 56384 - DNA, 18 bp, Homo Sapiens
gctatccattggtcttag

SEQ ID NO: 56385 - DNA, 23 bp, Homo Sapiens
gaccgcgtggcctaatggataag

SEQ ID NO: 56386 - DNA, 25 bp, Homo Sapiens
cggagatgaaaacctttttccaagg

SEQ ID NO: 56387 - DNA, 16 bp, Homo Sapiens
catggctttctcacca

SEQ ID NO: 56388 - DNA, 17 bp, Homo Sapiens
atagctcagtcggtaga

SEQ ID NO: 56389 - DNA, 20 bp, Homo Sapiens
cattggtggttcagtggtag

SEQ ID NO: 56390 - DNA, 16 bp, Homo Sapiens
gcccggctagctcagt

SEQ ID NO: 56391 - DNA, 28 bp, Homo Sapiens
atggttagcactctggactttgaatcca

SEQ ID NO: 56392 - DNA, 30 bp, Homo Sapiens; identical to SEQ ID NO: 27917

SEQ ID NO: 56393 - DNA, 23 bp, Homo Sapiens
gctcagtcggtagagcatcagac

SEQ ID NO: 56394 - DNA, 18 bp, Homo Sapiens
caggggttagagcactgg

SEQ ID NO: 56395 - DNA, 24 bp, Homo Sapiens
gttcaattccccgacggggagcca

SEQ ID NO: 56396 - DNA, 17 bp, Homo Sapiens
gttttgcagtccttacc

SEQ ID NO: 56397 - DNA, 34 bp, Homo Sapiens; identical to SEQ ID NO: 16836

SEQ ID NO: 56398 - DNA, 21 bp, Homo Sapiens
aagaactgctaactcatgccc

SEQ ID NO: 56399 - DNA, 22 bp, Homo Sapiens
caacttacacttaggagatttc

SEQ ID NO: 56400 - DNA, 16 bp, Homo Sapiens
cctctttttaccacca

SEQ ID NO: 56401 - DNA, 18 bp, Homo Sapiens
gatagctcagtcggtaga

SEQ ID NO: 56402 - DNA, 23 bp, Homo Sapiens
gttcgaatccggctcgaaggacc

SEQ ID NO: 56403 - DNA, 27 bp, Homo Sapiens
gctgagtgaagcattggactgtaaatc

SEQ ID NO: 56404 - DNA, 26 bp, Homo Sapiens
tggtctagcggttaggattcctggtt

SEQ ID NO: 56405 - DNA, 16 bp, Homo Sapiens
gttcgattccccgacg

SEQ ID NO: 56406 - DNA, 24 bp, Homo Sapiens
gttcgatcccgggtttcggcacca

SEQ ID NO: 56407 - DNA, 25 bp, Homo Sapiens
gtggtctagtggttaggattcggcg

SEQ ID NO: 56408 - DNA, 19 bp, Homo Sapiens
caaatctcggtggaacctc

SEQ ID NO: 56409 - DNA, 29 bp, Homo Sapiens
ttgtgggtttaagtcccattggtctagcc

SEQ ID NO: 56410 - DNA, 24 bp, Homo Sapiens
gttcgaatcctgccgactacgcca

SEQ ID NO: 56411 - DNA, 20 bp, Homo Sapiens
ccgaaaatgttggttatacc

SEQ ID NO: 56412 - DNA, 22 bp, Homo Sapiens
ttcaagtcacgtcggggtcacc

SEQ ID NO: 56413 - DNA, 19 bp, Homo Sapiens
gatagctcagtcggtagag

SEQ ID NO: 56414 - DNA, 28 bp, Homo Sapiens
gttcttgtagttgaaatacaacgatggt

SEQ ID NO: 56415 - DNA, 26 bp, Homo Sapiens
ctggactctgaatccagcgatccgag

SEQ ID NO: 56416 - DNA, 23 bp, Homo Sapiens
gtagtggttatcacgtctgcttt

SEQ ID NO: 56417 - DNA, 16 bp, Homo Sapiens
gtcaggatggccgagt

SEQ ID NO: 56418 - DNA, 24 bp, Homo Sapiens
agctcagtcggtagagcatgagac

SEQ ID NO: 56419 - DNA, 23 bp, Homo Sapiens
ggtaaaatggctgagtgaagcat

SEQ ID NO: 56420 - DNA, 32 bp, Homo Sapiens; identical to SEQ ID NO: 16341

SEQ ID NO: 56421 - DNA, 18 bp, Homo Sapiens
gctctcaccgccgcggcc

SEQ ID NO: 56422 - DNA, 24 bp, Homo Sapiens
gttcgagcccacccagggacgcca

SEQ ID NO: 56423 - DNA, 23 bp, Homo Sapiens
agtaaggtcagctaaataagcta

SEQ ID NO: 56424 - DNA, 28 bp, Homo Sapiens
aacatcagattgtgaatctgacaacaga

SEQ ID NO: 56425 - DNA, 17 bp, Homo Sapiens
cattcttgcgacccggg

SEQ ID NO: 56426 - DNA, 21 bp, Homo Sapiens
gttatacccttcccgtactac

SEQ ID NO: 56427 - DNA, 18 bp, Homo Sapiens
gttgtagtccgtgcgaga

SEQ ID NO: 56428 - DNA, 23 bp, Homo Sapiens
caagaactgctaactcatgcccc

SEQ ID NO: 56429 - DNA, 29 bp, Homo Sapiens
gcgttggtggtatagtggtaagcatagct

SEQ ID NO: 56430 - DNA, 20 bp, Homo Sapiens
gtggttatcacgtctgcttt

SEQ ID NO: 56431 - DNA, 31 bp, Homo Sapiens; identical to SEQ ID NO: 6209

SEQ ID NO: 56432 - DNA, 26 bp, Homo Sapiens
gtggttagtactctgcgttgtggccg

SEQ ID NO: 56433 - DNA, 27 bp, Homo Sapiens
gcataggtggttcagtggtagaattct

SEQ ID NO: 56434 - DNA, 22 bp, Homo Sapiens
ggttcaattccccgacggggag

SEQ ID NO: 56435 - DNA, 16 bp, Homo Sapiens
cccccttatttctacc

SEQ ID NO: 56436 - DNA, 18 bp, Homo Sapiens
gctagctcagtcggtaga

SEQ ID NO: 56437 - DNA, 20 bp, Homo Sapiens
tcttaatcccagggtcgtgg

SEQ ID NO: 56438 - DNA, 25 bp, Homo Sapiens
gaaagctcacaagaactgctaactc

SEQ ID NO: 56439 - DNA, 29 bp, Homo Sapiens
gacaggggttaggcctctttttaccacca

SEQ ID NO: 56440 - DNA, 29 bp, Homo Sapiens
ggctccgtggcgcaatggatagcgcattg

SEQ ID NO: 56441 - DNA, 17 bp, Homo Sapiens
cgaccccttatttaccc

SEQ ID NO: 56442 - DNA, 25 bp, Homo Sapiens
aggcttacgaccccttatttacccc

SEQ ID NO: 56443 - DNA, 20 bp, Homo Sapiens
taaacccccttatttctacc

SEQ ID NO: 56444 - DNA, 23 bp, Homo Sapiens
cagtcggtagagcatcagacttt

SEQ ID NO: 56445 - DNA, 26 bp, Homo Sapiens
ttggtctaggggtatgattctcgctt

SEQ ID NO: 56446 - DNA, 21 bp, Homo Sapiens
gcttcaaacctgccggggctt

SEQ ID NO: 56447 - DNA, 16 bp, Homo Sapiens
tcattggtcgtggttg

SEQ ID NO: 56448 - DNA, 24 bp, Homo Sapiens
ggagatgaaaacctttttccaagg

SEQ ID NO: 56449 - DNA, 24 bp, Homo Sapiens
gagaaccaacacctctttacagtg

SEQ ID NO: 56450 - DNA, 32 bp, Homo Sapiens; identical to SEQ ID NO: 11010

SEQ ID NO: 56451 - DNA, 20 bp, Homo Sapiens
cagttggtagagcatcagac

SEQ ID NO: 56452 - DNA, 24 bp, Homo Sapiens
gacaacattcaaaaaagagtacca

SEQ ID NO: 56453 - DNA, 26 bp, Homo Sapiens
atcgtatagtggttagtactctgcgt

SEQ ID NO: 56454 - DNA, 23 bp, Homo Sapiens
gggttaggcctctttttaccacc

SEQ ID NO: 56455 - DNA, 18 bp, Homo Sapiens
tacccttcccgtactacc

SEQ ID NO: 56456 - DNA, 28 bp, Homo Sapiens
tgtgggtttaagtcccattggtctagcc

SEQ ID NO: 56457 - DNA, 33 bp, Homo Sapiens; identical to SEQ ID NO: 17430

SEQ ID NO: 56458 - DNA, 24 bp, Homo Sapiens
ggttcgattctcatagtcctagcc

SEQ ID NO: 56459 - DNA, 20 bp, Homo Sapiens
gtagtccgtgcgagaatacc

SEQ ID NO: 56460 - DNA, 21 bp, Homo Sapiens
aagtgtttgtgggtttaagtc

SEQ ID NO: 56461 - DNA, 24 bp, Homo Sapiens
agttgcaatacttaatttctgcca

SEQ ID NO: 56462 - DNA, 24 bp, Homo Sapiens
gtctagcggttaggattcctggtt

SEQ ID NO: 56463 - DNA, 27 bp, Homo Sapiens
gctagctcagtcggtagagcatgagac

SEQ ID NO: 56464 - DNA, 23 bp, Homo Sapiens
agaactgctaactcatgccccca

SEQ ID NO: 56465 - DNA, 29 bp, Homo Sapiens
ggtggtctagtggttaggattcggcgctc

SEQ ID NO: 56466 - DNA, 36 bp, Homo Sapiens; identical to SEQ ID NO: 7568

SEQ ID NO: 56467 - DNA, 32 bp, Homo Sapiens; identical to SEQ ID NO: 19933

SEQ ID NO: 56468 - DNA, 35 bp, Homo Sapiens; identical to SEQ ID NO: 16837

SEQ ID NO: 56469 - DNA, 30 bp, Homo Sapiens; identical to SEQ ID NO: 2272

SEQ ID NO: 56470 - DNA, 17 bp, Homo Sapiens
tctcatagtcctagcca

SEQ ID NO: 56471 - DNA, 23 bp, Homo Sapiens
gtggggttttgcagtccttacca

SEQ ID NO: 56472 - DNA, 16 bp, Homo Sapiens
ggtatgattctcgctt

SEQ ID NO: 56473 - DNA, 20 bp, Homo Sapiens
ctgtcacgcgggagaccggg

SEQ ID NO: 56474 - DNA, 24 bp, Homo Sapiens
gaaaacctttttccaaggacacca

SEQ ID NO: 56475 - DNA, 19 bp, Homo Sapiens
aacccccttatttctacca

SEQ ID NO: 56476 - DNA, 24 bp, Homo Sapiens
gctcagtcggtagagcatgggact

SEQ ID NO: 56477 - DNA, 19 bp, Homo Sapiens
gttaactaagtgtttgtgg

SEQ ID NO: 56478 - DNA, 17 bp, Homo Sapiens
ctttttccaaggacacc

SEQ ID NO: 56479 - DNA, 18 bp, Homo Sapiens
gtcccatctgggtcgcca

SEQ ID NO: 56480 - DNA, 17 bp, Homo Sapiens
gttcgactcccggtgtg

SEQ ID NO: 56481 - DNA, 19 bp, Homo Sapiens
ttcaaacctgccggggctt

SEQ ID NO: 56482 - DNA, 31 bp, Homo Sapiens; identical to SEQ ID NO: 9621

SEQ ID NO: 56483 - DNA, 28 bp, Homo Sapiens
ccatggtgtaatggttagcactctggac

SEQ ID NO: 56484 - DNA, 24 bp, Homo Sapiens
gctttgcacgtatgaggccccggg

SEQ ID NO: 56485 - DNA, 19 bp, Homo Sapiens
caagaactgctaactcatg

SEQ ID NO: 56486 - DNA, 23 bp, Homo Sapiens
tgaagcattggactgtaaatcta

SEQ ID NO: 56487 - DNA, 20 bp, Homo Sapiens
tagcactctggactttgaat

SEQ ID NO: 56488 - DNA, 22 bp, Homo Sapiens
gttgcaatacttaatttctgcc

SEQ ID NO: 56489 - DNA, 28 bp, Homo Sapiens
aatacactgaaaatgtttagacgggctc

SEQ ID NO: 56490 - DNA, 17 bp, Homo Sapiens
gctctcaccgccgcggc

SEQ ID NO: 56491 - DNA, 33 bp, Homo Sapiens; identical to SEQ ID NO: 27532

SEQ ID NO: 56492 - DNA, 29 bp, Homo Sapiens
tgggtggttcagtggtagaattctcgcct

SEQ ID NO: 56493 - DNA, 18 bp, Homo Sapiens
actccaaataaaagtacc

SEQ ID NO: 56494 - DNA, 16 bp, Homo Sapiens
cggtagagcatgggac

SEQ ID NO: 56495 - DNA, 17 bp, Homo Sapiens
aagattaagagaaccaa

SEQ ID NO: 56496 - DNA, 21 bp, Homo Sapiens
catgggtggttcagtggtaga

SEQ ID NO: 56497 - DNA, 25 bp, Homo Sapiens
gtggttaggattcggcgctctcacc

SEQ ID NO: 56498 - DNA, 25 bp, Homo Sapiens
agtgtagtggttatcacgttcgcct

SEQ ID NO: 56499 - DNA, 18 bp, Homo Sapiens
attctcatagtcctagcc

SEQ ID NO: 56500 - DNA, 19 bp, Homo Sapiens
aacatcagattgtgaatct

SEQ ID NO: 56501 - DNA, 18 bp, Homo Sapiens
ggcctctttttaccacca

SEQ ID NO: 56502 - DNA, 20 bp, Homo Sapiens
gcggttatcacgtctgcttt

SEQ ID NO: 56503 - DNA, 19 bp, Homo Sapiens
gggatgtagctcagtggta

SEQ ID NO: 56504 - DNA, 17 bp, Homo Sapiens
tcctcgttagtatagtg

SEQ ID NO: 56505 - DNA, 17 bp, Homo Sapiens
cccagtggcctaatgga

SEQ ID NO: 56506 - DNA, 30 bp, Homo Sapiens; identical to SEQ ID NO: 31052

SEQ ID NO: 56507 - DNA, 36 bp, Homo Sapiens; identical to SEQ ID NO: 31108

SEQ ID NO: 56508 - DNA, 24 bp, Homo Sapiens
tgaaaacctttttccaaggacacc

SEQ ID NO: 56509 - DNA, 19 bp, Homo Sapiens
ttaggattcggcgctctca

SEQ ID NO: 56510 - DNA, 19 bp, Homo Sapiens
aacacctctttacagtgac

SEQ ID NO: 56511 - DNA, 33 bp, Homo Sapiens; identical to SEQ ID NO: 14911

SEQ ID NO: 56512 - DNA, 22 bp, Homo Sapiens
gagatgaaaacctttttccaag

SEQ ID NO: 56513 - DNA, 30 bp, Homo Sapiens; identical to SEQ ID NO: 1152

SEQ ID NO: 56514 - DNA, 16 bp, Homo Sapiens
aagattaagagaacca

SEQ ID NO: 56515 - DNA, 19 bp, Homo Sapiens
gattccttccttttttgcc

SEQ ID NO: 56516 - DNA, 22 bp, Homo Sapiens
cgtggttgtagtccgtgcgaga

SEQ ID NO: 56517 - DNA, 23 bp, Homo Sapiens
ggttaggcctctttttaccacca

SEQ ID NO: 56518 - DNA, 20 bp, Homo Sapiens
caatccccggcacctccacc

SEQ ID NO: 56519 - DNA, 36 bp, Homo Sapiens; identical to SEQ ID NO: 11075

SEQ ID NO: 56520 - DNA, 17 bp, Homo Sapiens
gggggtatagctcagtg

SEQ ID NO: 56521 - DNA, 21 bp, Homo Sapiens
agaaatatgtctgataaaaga

SEQ ID NO: 56522 - DNA, 27 bp, Homo Sapiens
agaaccaacacctctttacagtgacca

SEQ ID NO: 56523 - DNA, 32 bp, Homo Sapiens; identical to SEQ ID NO: 10377

SEQ ID NO: 56524 - DNA, 18 bp, Homo Sapiens
ctaggggtatgattctcg

SEQ ID NO: 56525 - DNA, 16 bp, Homo Sapiens
tcctgctcacagcgcc

SEQ ID NO: 56526 - DNA, 20 bp, Homo Sapiens
ttcaaacctgccggggcttc

SEQ ID NO: 56527 - DNA, 20 bp, Homo Sapiens
ttacgaccccttatttaccc

SEQ ID NO: 56528 - DNA, 36 bp, Homo Sapiens; identical to SEQ ID NO: 10599

SEQ ID NO: 56529 - DNA, 17 bp, Homo Sapiens
tatgattctcggtttgg

SEQ ID NO: 56530 - DNA, 19 bp, Homo Sapiens
ggttcaaatcccggacgag

SEQ ID NO: 56531 - DNA, 23 bp, Homo Sapiens
gtttaagtcccattggtctagcc

SEQ ID NO: 56532 - DNA, 36 bp, Homo Sapiens; identical to SEQ ID NO: 30465

SEQ ID NO: 56533 - DNA, 32 bp, Homo Sapiens; identical to SEQ ID NO: 25532

SEQ ID NO: 56534 - DNA, 16 bp, Homo Sapiens
ctagctcagtcggtag

SEQ ID NO: 56535 - DNA, 25 bp, Homo Sapiens
gctggtgtagtggtatcatgcaaga

SEQ ID NO: 56536 - DNA, 25 bp, Homo Sapiens
gtctaacaacatggctttctcacca

SEQ ID NO: 56537 - DNA, 24 bp, Homo Sapiens
gctcagtcggtagagcatgagact

SEQ ID NO: 56538 - DNA, 24 bp, Homo Sapiens
ggttcgattccttccttttttgcc

SEQ ID NO: 56539 - DNA, 26 bp, Homo Sapiens
gaggcttacgaccccttatttacccc

SEQ ID NO: 56540 - DNA, 36 bp, Homo Sapiens; identical to SEQ ID NO: 11903

SEQ ID NO: 56541 - DNA, 31 bp, Homo Sapiens; identical to SEQ ID NO: 20364

SEQ ID NO: 56542 - DNA, 19 bp, Homo Sapiens
aactccaaataaaagtacc

SEQ ID NO: 56543 - DNA, 28 bp, Homo Sapiens
tagctcagtcggtagagcatcagacttt

SEQ ID NO: 56544 - DNA, 20 bp, Homo Sapiens
tctagcggttaggattcctg

SEQ ID NO: 56545 - DNA, 32 bp, Homo Sapiens; identical to SEQ ID NO: 25298

SEQ ID NO: 56546 - DNA, 29 bp, Homo Sapiens
caggcggcccgggttcgactcccggtgtg

SEQ ID NO: 56547 - DNA, 30 bp, Homo Sapiens; identical to SEQ ID NO: 6089

SEQ ID NO: 56548 - DNA, 22 bp, Homo Sapiens
ttgcaatacttaatttctgcca

SEQ ID NO: 56549 - DNA, 32 bp, Homo Sapiens; identical to SEQ ID NO: 19363

SEQ ID NO: 56550 - DNA, 27 bp, Homo Sapiens
atggttagcactctggactttgaatcc

SEQ ID NO: 56551 - DNA, 26 bp, Homo Sapiens
aggcttacgaccccttatttacccca

SEQ ID NO: 56552 - DNA, 27 bp, Homo Sapiens
gcaatggtggttcagtggtagaattct

SEQ ID NO: 56553 - DNA, 31 bp, Homo Sapiens; identical to SEQ ID NO: 23440

SEQ ID NO: 56554 - DNA, 31 bp, Homo Sapiens; identical to SEQ ID NO: 11097

SEQ ID NO: 56555 - DNA, 17 bp, Homo Sapiens
taatggataaggcactg

SEQ ID NO: 56556 - DNA, 28 bp, Homo Sapiens
cccggctagctcagtcggtagagcatgg

SEQ ID NO: 56557 - DNA, 27 bp, Homo Sapiens
tgttggttatacccttcccgtactacc

SEQ ID NO: 56558 - DNA, 29 bp, Homo Sapiens
aatgttggttatacccttcccgtactacc

SEQ ID NO: 56559 - DNA, 28 bp, Homo Sapiens
atgttggttatacccttcccgtactacc

SEQ ID NO: 56560 - DNA, 27 bp, Homo Sapiens
tcgtggttgtagtccgtgcgagaatac

SEQ ID NO: 56561 - DNA, 21 bp, Homo Sapiens
caacattcaaaaaagagtacc

SEQ ID NO: 56562 - DNA, 23 bp, Homo Sapiens
gcgctctcaccgccgcggcccgg

SEQ ID NO: 56563 - DNA, 36 bp, Homo Sapiens; identical to SEQ ID NO: 21408

SEQ ID NO: 56564 - DNA, 24 bp, Homo Sapiens
gtttatgtagcttacctcctcaaa

SEQ ID NO: 56565 - DNA, 17 bp, Homo Sapiens
cagttgacccgggttcg

SEQ ID NO: 56566 - DNA, 36 bp, Homo Sapiens; identical to SEQ ID NO: 29297

SEQ ID NO: 56567 - DNA, 18 bp, Homo Sapiens
gtcaggatggccgagtgg

SEQ ID NO: 56568 - DNA, 24 bp, Homo Sapiens
ggttccatagtgtagtggttatca

SEQ ID NO: 56569 - DNA, 22 bp, Homo Sapiens
ttcgattccccgacggggagcc

SEQ ID NO: 56570 - DNA, 21 bp, Homo Sapiens
agattgtgaatctgacaacag

SEQ ID NO: 56571 - DNA, 26 bp, Homo Sapiens
ggtctagtggttaggattcggcgctc

SEQ ID NO: 56572 - DNA, 17 bp, Homo Sapiens
ttcaaaaaagagtacca

SEQ ID NO: 56573 - DNA, 23 bp, Homo Sapiens
gttcgattccttccttttttgcc

SEQ ID NO: 56574 - DNA, 36 bp, Homo Sapiens; identical to SEQ ID NO: 10674

SEQ ID NO: 56575 - DNA, 33 bp, Homo Sapiens; identical to SEQ ID NO: 20366

SEQ ID NO: 56576 - DNA, 19 bp, Homo Sapiens
atacccttcccgtactacc

SEQ ID NO: 56577 - DNA, 23 bp, Homo Sapiens
gttcgattctcatagtcctagcc

SEQ ID NO: 56578 - DNA, 20 bp, Homo Sapiens
gattcggcgctctcaccgcc

SEQ ID NO: 56579 - DNA, 20 bp, Homo Sapiens
tcaaatcccggacgagcccc

SEQ ID NO: 56580 - DNA, 16 bp, Homo Sapiens
gttcttgtagttgaaa

SEQ ID NO: 56581 - DNA, 22 bp, Homo Sapiens
cagattgtgaatctgacaacag

SEQ ID NO: 56582 - DNA, 26 bp, Homo Sapiens
tggtagaattctcgcctgccacgcgg

SEQ ID NO: 56583 - DNA, 34 bp, Homo Sapiens; identical to SEQ ID NO: 20367

SEQ ID NO: 56584 - DNA, 32 bp, Homo Sapiens; identical to SEQ ID NO: 20185

SEQ ID NO: 56585 - DNA, 16 bp, Homo Sapiens
tcaaatcccggacgag

SEQ ID NO: 56586 - DNA, 36 bp, Homo Sapiens; identical to SEQ ID NO: 19548

SEQ ID NO: 56587 - DNA, 16 bp, Homo Sapiens
gtgtgaggtcccgggt

SEQ ID NO: 56588 - DNA, 36 bp, Homo Sapiens; identical to SEQ ID NO: 21176

SEQ ID NO: 56589 - DNA, 20 bp, Homo Sapiens
caacacctctttacagtgac

SEQ ID NO: 56590 - DNA, 17 bp, Homo Sapiens
tcctatatatcttacca

SEQ ID NO: 56591 - DNA, 36 bp, Homo Sapiens; identical to SEQ ID NO: 22459

SEQ ID NO: 56592 - DNA, 28 bp, Homo Sapiens
tggtagaattctcgcctgccacgcggga

SEQ ID NO: 56593 - DNA, 27 bp, Homo Sapiens
gagaaccaacacctctttacagtgacc

SEQ ID NO: 56594 - DNA, 23 bp, Homo Sapiens
ctagtggttaggattcggcgctc

SEQ ID NO: 56595 - DNA, 22 bp, Homo Sapiens
aaacctttttccaaggacacca

SEQ ID NO: 56596 - DNA, 28 bp, Homo Sapiens
gtggttaggattcggcgctctcaccgcc

SEQ ID NO: 56597 - DNA, 23 bp, Homo Sapiens
gctcagtcggtagagcatgggac

SEQ ID NO: 56598 - DNA, 29 bp, Homo Sapiens
gagtgaagcattggactgtaaatctaaag

SEQ ID NO: 56599 - DNA, 17 bp, Homo Sapiens
ctccaaataaaagtacc

SEQ ID NO: 56600 - DNA, 17 bp, Homo Sapiens
gtagtcgtggccgagtg

SEQ ID NO: 56601 - DNA, 23 bp, Homo Sapiens
taagccagggattgtgggttcga

SEQ ID NO: 56602 - DNA, 36 bp, Homo Sapiens; identical to SEQ ID NO: 7401

SEQ ID NO: 56603 - DNA, 36 bp, Homo Sapiens; identical to SEQ ID NO: 26853

SEQ ID NO: 56604 - DNA, 26 bp, Homo Sapiens
gagaaccaacacctctttacagtgac

SEQ ID NO: 56605 - DNA, 36 bp, Homo Sapiens; identical to SEQ ID NO: 30350

SEQ ID NO: 56606 - DNA, 30 bp, Homo Sapiens; identical to SEQ ID NO: 2849

SEQ ID NO: 56607 - DNA, 32 bp, Homo Sapiens; identical to SEQ ID NO: 2851

SEQ ID NO: 56608 - DNA, 17 bp, Homo Sapiens
gtcacgtcggggtcacc

SEQ ID NO: 56609 - DNA, 16 bp, Homo Sapiens
accccttatttacccc

SEQ ID NO: 56610 - DNA, 32 bp, Homo Sapiens; identical to SEQ ID NO: 6210

SEQ ID NO: 56611 - DNA, 22 bp, Homo Sapiens
ttaaccgaaaggttggtggttc

SEQ ID NO: 56612 - DNA, 16 bp, Homo Sapiens
ccgtgcgagaatacca

SEQ ID NO: 56613 - DNA, 16 bp, Homo Sapiens
tccctgtggtctagtg

SEQ ID NO: 56614 - DNA, 36 bp, Homo Sapiens; identical to SEQ ID NO: 8272

SEQ ID NO: 56615 - DNA, 27 bp, Homo Sapiens
tcggtagagcatgggactcttaatccc

SEQ ID NO: 56616 - DNA, 29 bp, Homo Sapiens
tagctcagtcggtagagcatcagactttt

SEQ ID NO: 56617 - DNA, 24 bp, Homo Sapiens
gttcgaatcccaccgctgccacca

SEQ ID NO: 56618 - DNA, 21 bp, Homo Sapiens
ttaaacccccttatttctacc

SEQ ID NO: 56619 - DNA, 29 bp, Homo Sapiens
cggctagctcagtcggtagagcatgagac

SEQ ID NO: 56620 - DNA, 28 bp, Homo Sapiens
atcattggtcgtggttgtagtccgtgcg

SEQ ID NO: 56621 - DNA, 20 bp, Homo Sapiens
cgctctcaccgccgcggccc

SEQ ID NO: 56622 - DNA, 28 bp, Homo Sapiens
atcgtatagtggttagtactctgcgttg

SEQ ID NO: 56623 - DNA, 25 bp, Homo Sapiens
gtgtagtggttatcacgttcgcctc

SEQ ID NO: 56624 - DNA, 33 bp, Homo Sapiens; identical to SEQ ID NO: 2980

SEQ ID NO: 56625 - DNA, 25 bp, Homo Sapiens
gtagcgtggccgagcggtctaaggc

SEQ ID NO: 56626 - DNA, 22 bp, Homo Sapiens
tcgtggttgtagtccgtgcgag

SEQ ID NO: 56627 - DNA, 29 bp, Homo Sapiens
tctggactctgaatccagcgatccgagtt

SEQ ID NO: 56628 - DNA, 32 bp, Homo Sapiens; identical to SEQ ID NO: 132

SEQ ID NO: 56629 - DNA, 36 bp, Homo Sapiens; identical to SEQ ID NO: 3484

SEQ ID NO: 56630 - DNA, 17 bp, Homo Sapiens
ggttaggattcctggtt

SEQ ID NO: 56631 - DNA, 28 bp, Homo Sapiens
gtcgtggttgtagtccgtgcgagaatac

SEQ ID NO: 56632 - DNA, 18 bp, Homo Sapiens
aaaatgtttagacgggct

SEQ ID NO: 56633 - DNA, 30 bp, Homo Sapiens; identical to SEQ ID NO: 4232

SEQ ID NO: 56634 - DNA, 17 bp, Homo Sapiens
ctcccggtgtgggaacc

SEQ ID NO: 56635 - DNA, 19 bp, Homo Sapiens
acacctctttacagtgacc

SEQ ID NO: 56636 - DNA, 24 bp, Homo Sapiens
cgtggttgtagtccgtgcgagaat

SEQ ID NO: 56637 - DNA, 23 bp, Homo Sapiens
cagtcggtagagcatgggactct

SEQ ID NO: 56638 - DNA, 20 bp, Homo Sapiens
gtggttatcacgttcgcctc

SEQ ID NO: 56639 - DNA, 17 bp, Homo Sapiens
gtcggtagagcatggga

SEQ ID NO: 56640 - DNA, 32 bp, Homo Sapiens; identical to SEQ ID NO: 21797

SEQ ID NO: 56641 - DNA, 21 bp, Homo Sapiens
agtgaagcattggactgtaaa

SEQ ID NO: 56642 - DNA, 24 bp, Homo Sapiens
gttcgattccttccttttttgcca

SEQ ID NO: 56643 - DNA, 20 bp, Homo Sapiens
gaagcattggactgtaaatc

SEQ ID NO: 56644 - DNA, 30 bp, Homo Sapiens; identical to SEQ ID NO: 18425

SEQ ID NO: 56645 - DNA, 25 bp, Homo Sapiens
tggtagaattctcgcctgccacgcg

SEQ ID NO: 56646 - DNA, 23 bp, Homo Sapiens
ccggatagctcagtcggtagagc

SEQ ID NO: 56647 - DNA, 22 bp, Homo Sapiens
ttggtggttcagtggtagaatt

SEQ ID NO: 56648 - DNA, 31 bp, Homo Sapiens; identical to SEQ ID NO: 24472

SEQ ID NO: 56649 - DNA, 17 bp, Homo Sapiens
ctagctcagtcggtaga

SEQ ID NO: 56650 - DNA, 22 bp, Homo Sapiens
tgggtttaagtcccattggtct

SEQ ID NO: 56651 - DNA, 33 bp, Homo Sapiens; identical to SEQ ID NO: 13256

SEQ ID NO: 56652 - DNA, 17 bp, Homo Sapiens
gaaaaagtcatggaggc

SEQ ID NO: 56653 - DNA, 30 bp, Homo Sapiens; identical to SEQ ID NO: 10495

SEQ ID NO: 56654 - DNA, 17 bp, Homo Sapiens
ggtcccatggtgtaatg

SEQ ID NO: 56655 - DNA, 17 bp, Homo Sapiens
aaccgggcagaagcacc

SEQ ID NO: 56656 - DNA, 33 bp, Homo Sapiens; identical to SEQ ID NO: 19757

SEQ ID NO: 56657 - DNA, 30 bp, Homo Sapiens; identical to SEQ ID NO: 7068

SEQ ID NO: 56658 - DNA, 29 bp, Homo Sapiens
agtggttaggattcggcgctctcaccgcc

SEQ ID NO: 56659 - DNA, 17 bp, Homo Sapiens
gaccccttatttacccc

SEQ ID NO: 56660 - DNA, 36 bp, Homo Sapiens; identical to SEQ ID NO: 21757

SEQ ID NO: 56661 - DNA, 23 bp, Homo Sapiens
gttcgagccccacgttgggcgcc

SEQ ID NO: 56662 - DNA, 36 bp, Homo Sapiens; identical to SEQ ID NO: 29577

SEQ ID NO: 56663 - DNA, 32 bp, Homo Sapiens; identical to SEQ ID NO: 12411

SEQ ID NO: 56664 - DNA, 26 bp, Homo Sapiens
ggagcttaaacccccttatttctacc

SEQ ID NO: 56665 - DNA, 36 bp, Homo Sapiens; identical to SEQ ID NO: 4154

SEQ ID NO: 56666 - DNA, 33 bp, Homo Sapiens; identical to SEQ ID NO: 22474

SEQ ID NO: 56667 - DNA, 25 bp, Homo Sapiens
ttcggcgctctcaccgccgcggccc

SEQ ID NO: 56668 - DNA, 20 bp, Homo Sapiens
gcgttggtggtatagtggta

SEQ ID NO: 56669 - DNA, 32 bp, Homo Sapiens; identical to SEQ ID NO: 23441

SEQ ID NO: 56670 - DNA, 33 bp, Homo Sapiens; identical to SEQ ID NO: 27920

SEQ ID NO: 56671 - DNA, 30 bp, Homo Sapiens; identical to SEQ ID NO: 7979

SEQ ID NO: 56672 - DNA, 23 bp, Homo Sapiens
gtgaagcattggactgtaaatct

SEQ ID NO: 56673 - DNA, 31 bp, Homo Sapiens; identical to SEQ ID NO: 9764

SEQ ID NO: 56674 - DNA, 32 bp, Homo Sapiens; identical to SEQ ID NO: 6406

SEQ ID NO: 56675 - DNA, 31 bp, Homo Sapiens; identical to SEQ ID NO: 6405

SEQ ID NO: 56676 - DNA, 33 bp, Homo Sapiens; identical to SEQ ID NO: 6211

SEQ ID NO: 56677 - DNA, 25 bp, Homo Sapiens
gttaggattcggcgctctcaccgcc

SEQ ID NO: 56678 - DNA, 27 bp, Homo Sapiens
gattcggcgctctcaccgccgcggccc

SEQ ID NO: 56679 - DNA, 36 bp, Homo Sapiens; identical to SEQ ID NO: 6410

SEQ ID NO: 56680 - DNA, 33 bp, Homo Sapiens; identical to SEQ ID NO: 24474

SEQ ID NO: 56681 - DNA, 21 bp, Homo Sapiens
ggattcggcgctctcaccgcc

SEQ ID NO: 56682 - DNA, 26 bp, Homo Sapiens
attcggcgctctcaccgccgcggccc

SEQ ID NO: 56683 - DNA, 31 bp, Homo Sapiens; identical to SEQ ID NO: 30378

SEQ ID NO: 56684 - DNA, 29 bp, Homo Sapiens
ggctagctcagtcggtagagcatgggact

SEQ ID NO: 56685 - DNA, 36 bp, Homo Sapiens; identical to SEQ ID NO: 14589

SEQ ID NO: 56686 - DNA, 30 bp, Homo Sapiens; identical to SEQ ID NO: 7529

SEQ ID NO: 56687 - DNA, 25 bp, Homo Sapiens
gtcgtggttgtagtccgtgcgagaa

SEQ ID NO: 56688 - DNA, 18 bp, Homo Sapiens
tcgtggttgtagtccgtg

SEQ ID NO: 56689 - DNA, 27 bp, Homo Sapiens
ggagcttaaacccccttatttctacca

SEQ ID NO: 56690 - DNA, 30 bp, Homo Sapiens; identical to SEQ ID NO: 31181

SEQ ID NO: 56691 - DNA, 23 bp, Homo Sapiens
gttagcactctggactttgaatc

SEQ ID NO: 56692 - DNA, 30 bp, Homo Sapiens; identical to SEQ ID NO: 25831

SEQ ID NO: 56693 - DNA, 32 bp, Homo Sapiens; identical to SEQ ID NO: 25478

SEQ ID NO: 56694 - DNA, 31 bp, Homo Sapiens; identical to SEQ ID NO: 2233

SEQ ID NO: 56695 - DNA, 36 bp, Homo Sapiens; identical to SEQ ID NO: 20369

SEQ ID NO: 56696 - DNA, 33 bp, Homo Sapiens; identical to SEQ ID NO: 24042

SEQ ID NO: 56697 - DNA, 30 bp, Homo Sapiens; identical to SEQ ID NO: 9763

SEQ ID NO: 56698 - DNA, 16 bp, Homo Sapiens
tggttaggattcggcg

SEQ ID NO: 56699 - DNA, 32 bp, Homo Sapiens; identical to SEQ ID NO: 30379

SEQ ID NO: 56700 - DNA, 28 bp, Homo Sapiens
gctagctcagtcggtagagcatgggact

SEQ ID NO: 56701 - DNA, 27 bp, Homo Sapiens
ggtcgtggttgtagtccgtgcgagaat

SEQ ID NO: 56702 - DNA, 21 bp, Homo Sapiens
cgagtcctgccgcggtcgcca

SEQ ID NO: 56703 - DNA, 30 bp, Homo Sapiens; identical to SEQ ID NO: 10129

SEQ ID NO: 56704 - DNA, 21 bp, Homo Sapiens
gtttccgtagtgtagtggtca

SEQ ID NO: 56705 - DNA, 33 bp, Homo Sapiens; identical to SEQ ID NO: 25533

SEQ ID NO: 56706 - DNA, 30 bp, Homo Sapiens; identical to SEQ ID NO: 24039

SEQ ID NO: 56707 - DNA, 32 bp, Homo Sapiens; identical to SEQ ID NO: 16849

SEQ ID NO: 56708 - DNA, 30 bp, Homo Sapiens; identical to SEQ ID NO: 16253

SEQ ID NO: 56709 - DNA, 33 bp, Homo Sapiens; identical to SEQ ID NO: 25479

SEQ ID NO: 56710 - DNA, 32 bp, Homo Sapiens; identical to SEQ ID NO: 16804

SEQ ID NO: 56711 - DNA, 32 bp, Homo Sapiens; identical to SEQ ID NO: 16829

SEQ ID NO: 56712 - DNA, 24 bp, Homo Sapiens
ataacagctatccattggtcttag

SEQ ID NO: 56713 - DNA, 22 bp, Homo Sapiens
ccttccaagcagttgacccggg

SEQ ID NO: 56714 - DNA, 20 bp, Homo Sapiens
taggggtatgattctcgctt

SEQ ID NO: 56715 - DNA, 23 bp, Homo Sapiens
cgtggttgtagtccgtgcgagaa

SEQ ID NO: 56716 - DNA, 29 bp, Homo Sapiens
cggatagctcagtcggtagagcatcagac

SEQ ID NO: 56717 - DNA, 17 bp, Homo Sapiens
aaccgggcggaaacacc

SEQ ID NO: 56718 - DNA, 24 bp, Homo Sapiens
gggttaggcctctttttaccacca

SEQ ID NO: 56719 - DNA, 19 bp, Homo Sapiens
aattaactagttttgacaa

SEQ ID NO: 56720 - DNA, 22 bp, Homo Sapiens
gttaggattcggcgctctcacc

SEQ ID NO: 56721 - DNA, 23 bp, Homo Sapiens
gtgtagtggttatcacgttcgcc

SEQ ID NO: 56722 - DNA, 16 bp, Homo Sapiens
tctcggtgggacctcc

SEQ ID NO: 56723 - DNA, 17 bp, Homo Sapiens
ttcccgggcggcgcacc

SEQ ID NO: 56724 - DNA, 18 bp, Homo Sapiens
tcccgggcggaaacacca

SEQ ID NO: 56725 - DNA, 22 bp, Homo Sapiens
agtggtagaattctcgcctgcc

SEQ ID NO: 56726 - DNA, 23 bp, Homo Sapiens
ctcgcctgccacgcgggaggccc

SEQ ID NO: 56727 - DNA, 19 bp, Homo Sapiens
ggttcgattcccggtcagg

SEQ ID NO: 56728 - DNA, 17 bp, Homo Sapiens
acctctttacagtgacc

SEQ ID NO: 56729 - DNA, 25 bp, Homo Sapiens
gagcttaaacccccttatttctacc

SEQ ID NO: 56730 - DNA, 30 bp, Homo Sapiens; identical to SEQ ID NO: 12504

SEQ ID NO: 56731 - DNA, 28 bp, Homo Sapiens
gcaatggtggttcagtggtagaattctc

SEQ ID NO: 56732 - DNA, 29 bp, Homo Sapiens
ttggtggttcagtggtagaattctcgcct

SEQ ID NO: 56733 - DNA, 18 bp, Homo Sapiens
atcctatatatcttacca

SEQ ID NO: 56734 - DNA, 21 bp, Homo Sapiens
gggggtatagctcagtggtag

SEQ ID NO: 56735 - DNA, 29 bp, Homo Sapiens
gtccttgtagtataaactaatacaccagt

SEQ ID NO: 56736 - DNA, 27 bp, Homo Sapiens
gcactggtggttcagtggtagaattct

SEQ ID NO: 56737 - DNA, 21 bp, Homo Sapiens
tagcggttaggattcctggtt

SEQ ID NO: 56738 - DNA, 17 bp, Homo Sapiens
ccgcgtggcctaatgga

SEQ ID NO: 56739 - DNA, 24 bp, Homo Sapiens
agctcagtcggtagagcatcagac

SEQ ID NO: 56740 - DNA, 21 bp, Homo Sapiens
taaacccccttatttctacca

SEQ ID NO: 56741 - DNA, 25 bp, Homo Sapiens
ggttcgagtcccggcggagtcgcca

SEQ ID NO: 56742 - DNA, 20 bp, Homo Sapiens
aacaacatggctttctcacc

SEQ ID NO: 56743 - DNA, 24 bp, Homo Sapiens
tcagtcggtagagcatgggactct

SEQ ID NO: 56744 - DNA, 23 bp, Homo Sapiens
gtaatggtgagcactctggactc

SEQ ID NO: 56745 - DNA, 20 bp, Homo Sapiens
aggggtagagcatttgactg

SEQ ID NO: 56746 - DNA, 21 bp, Homo Sapiens
ggttaggattcggcgctctca

SEQ ID NO: 56747 - DNA, 17 bp, Homo Sapiens
ggttccatagtgtagtg

SEQ ID NO: 56748 - DNA, 16 bp, Homo Sapiens
cagtcggtagagcatg

SEQ ID NO: 56749 - DNA, 16 bp, Homo Sapiens
cctctttacagtgacc

SEQ ID NO: 56750 - DNA, 19 bp, Homo Sapiens
tcgaatcccatcctcgtcg

SEQ ID NO: 56751 - DNA, 29 bp, Homo Sapiens
ggagatgaaaacctttttccaaggacacc

SEQ ID NO: 56752 - DNA, 26 bp, Homo Sapiens
gtggagttaaagactttttctctgac

SEQ ID NO: 56753 - DNA, 20 bp, Homo Sapiens
gcaatacttaatttctgcca

SEQ ID NO: 56754 - DNA, 21 bp, Homo Sapiens
gctcacaagaactgctaactc

SEQ ID NO: 56755 - DNA, 29 bp, Homo Sapiens
gtttccgtagtgtagcggttatcacattc

SEQ ID NO: 56756 - DNA, 29 bp, Homo Sapiens
gcccccatgtctaacaacatggctttctc

SEQ ID NO: 56757 - DNA, 17 bp, Homo Sapiens
atcacgtcggggtcacc

SEQ ID NO: 56758 - DNA, 21 bp, Homo Sapiens
gttaggcctctttttaccacc

SEQ ID NO: 56759 - DNA, 23 bp, Homo Sapiens
gtggttaggattcggcgctctca

SEQ ID NO: 56760 - DNA, 22 bp, Homo Sapiens
tagtactctgcgttgtggccgc

SEQ ID NO: 56761 - DNA, 17 bp, Homo Sapiens
gttcttgtagttgaaat

SEQ ID NO: 56762 - DNA, 24 bp, Homo Sapiens
ggctcacatcaccccataaacacc

SEQ ID NO: 56763 - DNA, 30 bp, Homo Sapiens; identical to SEQ ID NO: 13916

SEQ ID NO: 56764 - DNA, 24 bp, Homo Sapiens
ggagttaaagactttttctctgac

SEQ ID NO: 56765 - DNA, 22 bp, Homo Sapiens
ctagcggttaggattcctggtt

SEQ ID NO: 56766 - DNA, 23 bp, Homo Sapiens
gtatagtggttagtactctgcgt

SEQ ID NO: 56767 - DNA, 28 bp, Homo Sapiens
ggtggagttaaagactttttctctgacc

SEQ ID NO: 56768 - DNA, 26 bp, Homo Sapiens
tggtctagtggttaggattcggcgct

SEQ ID NO: 56769 - DNA, 27 bp, Homo Sapiens
tcattggtcgtggttgtagtccgtgcg

SEQ ID NO: 56770 - DNA, 24 bp, Homo Sapiens
gcccccatgtctaacaacatggct

SEQ ID NO: 56771 - DNA, 29 bp, Homo Sapiens
ggttccatagtgtagcggttatcacgtct

SEQ ID NO: 56772 - DNA, 30 bp, Homo Sapiens; identical to SEQ ID NO: 22220

SEQ ID NO: 56773 - DNA, 18 bp, Homo Sapiens
cgtggttgtagtccgtgc

SEQ ID NO: 56774 - DNA, 23 bp, Homo Sapiens
gcttaaacccccttatttctacc

SEQ ID NO: 56775 - DNA, 18 bp, Homo Sapiens
gtccctgtccaggcgcca

SEQ ID NO: 56776 - DNA, 28 bp, Homo Sapiens
tgccgtgatcgtatagtggttagtactc

SEQ ID NO: 56777 - DNA, 20 bp, Homo Sapiens
tatacccttcccgtactacc

SEQ ID NO: 56778 - DNA, 16 bp, Homo Sapiens
gaaaaagtcatggagg

SEQ ID NO: 56779 - DNA, 23 bp, Homo Sapiens
gttgcaatacttaatttctgcca

SEQ ID NO: 56780 - DNA, 19 bp, Homo Sapiens
cccataacccagaggtcga

SEQ ID NO: 56781 - DNA, 26 bp, Homo Sapiens
caggggttaggcctctttttaccacc

SEQ ID NO: 56782 - DNA, 27 bp, Homo Sapiens
gaggcttacgaccccttatttacccca

SEQ ID NO: 56783 - DNA, 21 bp, Homo Sapiens
cgatgcccgcatcctccacca

SEQ ID NO: 56784 - DNA, 22 bp, Homo Sapiens
ggttccatagtgtagtggttat

SEQ ID NO: 56785 - DNA, 22 bp, Homo Sapiens
gggggattagctcaaatggtag

SEQ ID NO: 56786 - DNA, 24 bp, Homo Sapiens
gtttccgtagtgtagtggtcatca

SEQ ID NO: 56787 - DNA, 19 bp, Homo Sapiens
attctcatagtcctagcca

SEQ ID NO: 56788 - DNA, 21 bp, Homo Sapiens
gacgaggtggccgagtggtta

SEQ ID NO: 56789 - DNA, 30 bp, Homo Sapiens; identical to SEQ ID NO: 12521

SEQ ID NO: 56790 - DNA, 26 bp, Homo Sapiens
ttaggagatttcaacttaacttgacc

SEQ ID NO: 56791 - DNA, 25 bp, Homo Sapiens
gtatagtggttagtactctgcgttg

SEQ ID NO: 56792 - DNA, 18 bp, Homo Sapiens
ctcccggtgtgggaacca

SEQ ID NO: 56793 - DNA, 16 bp, Homo Sapiens
ctcatagtcctagcca

SEQ ID NO: 56794 - DNA, 30 bp, Homo Sapiens; identical to SEQ ID NO: 10275

SEQ ID NO: 56795 - DNA, 23 bp, Homo Sapiens
tccctggtggtctagtggctagg

SEQ ID NO: 56796 - DNA, 22 bp, Homo Sapiens
gtttgtgggtttaagtcccatt

SEQ ID NO: 56797 - DNA, 28 bp, Homo Sapiens
gtgatcgtatagtggttagtactctgcg

SEQ ID NO: 56798 - DNA, 24 bp, Homo Sapiens
ggttatacccttcccgtactacca

SEQ ID NO: 56799 - DNA, 21 bp, Homo Sapiens
ttatacccttcccgtactacc

SEQ ID NO: 56800 - DNA, 23 bp, Homo Sapiens
ggccccatggtgtaatggttagc

SEQ ID NO: 56801 - DNA, 28 bp, Homo Sapiens
aaaatggctgagtgaagcattggactgt

SEQ ID NO: 56802 - DNA, 21 bp, Homo Sapiens
gtagtcgtggccgagtggtta

SEQ ID NO: 56803 - DNA, 21 bp, Homo Sapiens
aacaacatggctttctcacca

SEQ ID NO: 56804 - DNA, 22 bp, Homo Sapiens
caacattcaaaaaagagtacca

SEQ ID NO: 56805 - DNA, 20 bp, Homo Sapiens
gggggtatagctcagtggta

SEQ ID NO: 56806 - DNA, 23 bp, Homo Sapiens
ctctggactctgaatccagcgat

SEQ ID NO: 56807 - DNA, 18 bp, Homo Sapiens
ttctcgctggggcctcca

SEQ ID NO: 56808 - DNA, 21 bp, Homo Sapiens
tctagcggttaggattcctgg

SEQ ID NO: 56809 - DNA, 30 bp, Homo Sapiens; identical to SEQ ID NO: 2232

SEQ ID NO: 56810 - DNA, 25 bp, Homo Sapiens
atttcaacttaacttgaccgctctg

SEQ ID NO: 56811 - DNA, 18 bp, Homo Sapiens
gcttctgtagtgtagtgg

SEQ ID NO: 56812 - DNA, 26 bp, Homo Sapiens
gagtgaagcattggactgtaaatcta

SEQ ID NO: 56813 - DNA, 27 bp, Homo Sapiens
cgtggttgtagtccgtgcgagaatacc

SEQ ID NO: 56814 - DNA, 21 bp, Homo Sapiens
cgattctcatagtcctagcca

SEQ ID NO: 56815 - DNA, 24 bp, Homo Sapiens
atcattggtcgtggttgtagtccg

SEQ ID NO: 56816 - DNA, 22 bp, Homo Sapiens
tggtctagtggttaggattcgg

SEQ ID NO: 56817 - DNA, 23 bp, Homo Sapiens
gggggtatagctcagtggtagag

SEQ ID NO: 56818 - DNA, 23 bp, Homo Sapiens
gtggttgtagtccgtgcgagaat

SEQ ID NO: 56819 - DNA, 26 bp, Homo Sapiens
gagatttcaacttaacttgaccgctc

SEQ ID NO: 56820 - DNA, 18 bp, Homo Sapiens
ggttttgcagtccttacc

SEQ ID NO: 56821 - DNA, 20 bp, Homo Sapiens
tacgaccccttatttacccc

SEQ ID NO: 56822 - DNA, 30 bp, Homo Sapiens; identical to SEQ ID NO: 7138

SEQ ID NO: 56823 - DNA, 21 bp, Homo Sapiens
atagtggttagtactctgcgt

SEQ ID NO: 56824 - DNA, 24 bp, Homo Sapiens
tcagtcggtagagcatcagacttt

SEQ ID NO: 56825 - DNA, 19 bp, Homo Sapiens
ggccctatagctcaggggt

SEQ ID NO: 56826 - DNA, 21 bp, Homo Sapiens
gggggattagctcaaatggta

SEQ ID NO: 56827 - DNA, 19 bp, Homo Sapiens
gggttttgcagtccttacc

SEQ ID NO: 56828 - DNA, 23 bp, Homo Sapiens
ggttatacccttcccgtactacc

SEQ ID NO: 56829 - DNA, 20 bp, Homo Sapiens
agtaaggtcagctaaataag

SEQ ID NO: 56830 - DNA, 24 bp, Homo Sapiens
ggtgtaatggttagcactctggac

SEQ ID NO: 56831 - DNA, 19 bp, Homo Sapiens
ttaaagactttttctctga

SEQ ID NO: 56832 - DNA, 24 bp, Homo Sapiens
ctagcggttaggattcctggtttt

SEQ ID NO: 56833 - DNA, 25 bp, Homo Sapiens
ttggttatacccttcccgtactacc

SEQ ID NO: 56834 - DNA, 22 bp, Homo Sapiens
ttagtactctgcgttgtggccg

SEQ ID NO: 56835 - DNA, 28 bp, Homo Sapiens
gcgttggtggtatagtggtaagcatagc

SEQ ID NO: 56836 - DNA, 29 bp, Homo Sapiens
agcagagtggcgcagcggaagcgtgctgg

SEQ ID NO: 56837 - DNA, 27 bp, Homo Sapiens
gctggtgtagtggtatcatgcaagatt

SEQ ID NO: 56838 - DNA, 22 bp, Homo Sapiens
gagttaaagactttttctctga

SEQ ID NO: 56839 - DNA, 19 bp, Homo Sapiens
gttcgattccccgacgggg

SEQ ID NO: 56840 - DNA, 21 bp, Homo Sapiens
caacacctctttacagtgacc

SEQ ID NO: 56841 - DNA, 21 bp, Homo Sapiens
tggttaggattcggcgctctc

SEQ ID NO: 56842 - DNA, 18 bp, Homo Sapiens
cgaccccttatttacccc

SEQ ID NO: 56843 - DNA, 23 bp, Homo Sapiens
ttagtactctgcgttgtggccgc

SEQ ID NO: 56844 - DNA, 21 bp, Homo Sapiens
tcgaatccggctcgaaggacc

SEQ ID NO: 56845 - DNA, 18 bp, Homo Sapiens
gttcttgtagttgaaata

SEQ ID NO: 56846 - DNA, 22 bp, Homo Sapiens
aacatcagattgtgaatctgac

SEQ ID NO: 56847 - DNA, 22 bp, Homo Sapiens
gtggttgtagtccgtgcgagaa

SEQ ID NO: 56848 - DNA, 16 bp, Homo Sapiens
ggttccatagtgtagt

SEQ ID NO: 56849 - DNA, 25 bp, Homo Sapiens
gcgccgctggtgtagtggtatcatg

SEQ ID NO: 56850 - DNA, 16 bp, Homo Sapiens
cccgggtttcggcacc

SEQ ID NO: 56851 - DNA, 19 bp, Homo Sapiens
gcggttaggattcctggtt

SEQ ID NO: 56852 - DNA, 28 bp, Homo Sapiens
tcgtggttgtagtccgtgcgagaatacc

SEQ ID NO: 56853 - DNA, 27 bp, Homo Sapiens
tggttaggattcggcgctctcaccgcc

SEQ ID NO: 56854 - DNA, 18 bp, Homo Sapiens
gccgcgtggcctaatgga

SEQ ID NO: 56855 - DNA, 22 bp, Homo Sapiens
gttatacccttcccgtactacc

SEQ ID NO: 56856 - DNA, 22 bp, Homo Sapiens
gcgttggtggtatagtggttag

SEQ ID NO: 56857 - DNA, 27 bp, Homo Sapiens
ggtggagttaaagactttttctctgac

SEQ ID NO: 56858 - DNA, 24 bp, Homo Sapiens
gttcgattctcatagtcctagcca

SEQ ID NO: 56859 - DNA, 20 bp, Homo Sapiens
ggtaaaatggctgagtgaag

SEQ ID NO: 56860 - DNA, 20 bp, Homo Sapiens
aacacctctttacagtgacc

SEQ ID NO: 56861 - DNA, 16 bp, Homo Sapiens
gcatgggtggttcagt

SEQ ID NO: 56862 - DNA, 19 bp, Homo Sapiens
tcgtggttgtagtccgtgc

SEQ ID NO: 56863 - DNA, 19 bp, Homo Sapiens
aaaatgtttagacgggctc

SEQ ID NO: 56864 - DNA, 18 bp, Homo Sapiens
agtaaggtcagctaaata

SEQ ID NO: 56865 - DNA, 24 bp, Homo Sapiens
gttcgagccccacgttgggcgcca

SEQ ID NO: 56866 - DNA, 28 bp, Homo Sapiens
gagatttcaacttaacttgaccgctctg

SEQ ID NO: 56867 - DNA, 21 bp, Homo Sapiens
ttacgaccccttatttacccc

SEQ ID NO: 56868 - DNA, 20 bp, Homo Sapiens
taatggttagcactctggac

SEQ ID NO: 56869 - DNA, 21 bp, Homo Sapiens
tcgaatccgagtcacggcacc

SEQ ID NO: 56870 - DNA, 18 bp, Homo Sapiens
aaccgggcggaaacacca

SEQ ID NO: 56871 - DNA, 27 bp, Homo Sapiens
caggggttaggcctctttttaccacca

SEQ ID NO: 56872 - DNA, 19 bp, Homo Sapiens
atccccagtacctccacca

SEQ ID NO: 56873 - DNA, 29 bp, Homo Sapiens
tgccgtgatcgtatagtggttagtactct

SEQ ID NO: 56874 - DNA, 18 bp, Homo Sapiens
aacatggctttctcacca

SEQ ID NO: 56875 - DNA, 18 bp, Homo Sapiens
cagattgtgaatctgaca

SEQ ID NO: 56876 - DNA, 29 bp, Homo Sapiens
gattgtgaatctgacaacagaggcttacg

SEQ ID NO: 56877 - DNA, 25 bp, Homo Sapiens
tgccgtgatcgtatagtggttagta

SEQ ID NO: 56878 - DNA, 20 bp, Homo Sapiens
gtggttgtagtccgtgcgag

SEQ ID NO: 56879 - DNA, 19 bp, Homo Sapiens
atcattggtcgtggttgta

SEQ ID NO: 56880 - DNA, 22 bp, Homo Sapiens
gttcttgtagttgaaatacaac

SEQ ID NO: 56881 - DNA, 25 bp, Homo Sapiens
tggttgtagtccgtgcgagaatacc

SEQ ID NO: 56882 - DNA, 30 bp, Homo Sapiens; identical to SEQ ID NO: 17317

SEQ ID NO: 56883 - DNA, 29 bp, Homo Sapiens
gcgttggtggtatagtggtgagcatagct

SEQ ID NO: 56884 - DNA, 29 bp, Homo Sapiens
ggtcgtggttgtagtccgtgcgagaatac

SEQ ID NO: 56885 - DNA, 22 bp, Homo Sapiens
gttaggcctctttttaccacca

SEQ ID NO: 56886 - DNA, 29 bp, Homo Sapiens
taaccaaaacatcagattgtgaatctgac

SEQ ID NO: 56887 - DNA, 28 bp, Homo Sapiens
gagaaccaacacctctttacagtgacca

SEQ ID NO: 56888 - DNA, 28 bp, Homo Sapiens
gccgtgatcgtatagtggttagtactct

SEQ ID NO: 56889 - DNA, 22 bp, Homo Sapiens
gacctcgtggcgcaatggtagc

SEQ ID NO: 56890 - DNA, 30 bp, Homo Sapiens; identical to SEQ ID NO: 6995

SEQ ID NO: 56891 - DNA, 20 bp, Homo Sapiens
gttcttgtagttgaaataca

SEQ ID NO: 56892 - DNA, 23 bp, Homo Sapiens
gtgtaatggttagcactctggac

SEQ ID NO: 56893 - DNA, 21 bp, Homo Sapiens
gttcgattcccggtcagggaa

SEQ ID NO: 56894 - DNA, 21 bp, Homo Sapiens
tcagtcggtagagcatgagac

SEQ ID NO: 56895 - DNA, 26 bp, Homo Sapiens
aacatcagattgtgaatctgacaaca

SEQ ID NO: 56896 - DNA, 24 bp, Homo Sapiens
gcgttggtggtatagtggttagca

SEQ ID NO: 56897 - DNA, 28 bp, Homo Sapiens
cattggtcgtggttgtagtccgtgcgag

SEQ ID NO: 56898 - DNA, 22 bp, Homo Sapiens
caacacctctttacagtgacca

SEQ ID NO: 56899 - DNA, 21 bp, Homo Sapiens
agtaaggtcagctaaataagc

SEQ ID NO: 56900 - DNA, 18 bp, Homo Sapiens
gtggtatcatgcaagatt

SEQ ID NO: 56901 - DNA, 28 bp, Homo Sapiens
gtttccgtagtgtagcggttatcacatt

SEQ ID NO: 56902 - DNA, 20 bp, Homo Sapiens
ggtcgtggttgtagtccgtg

SEQ ID NO: 56903 - DNA, 22 bp, Homo Sapiens
tagtggttaggattcggcgctc

SEQ ID NO: 56904 - DNA, 26 bp, Homo Sapiens
aggggttaggcctctttttaccacca

SEQ ID NO: 56905 - DNA, 23 bp, Homo Sapiens
gtcgtggttgtagtccgtgcgag

SEQ ID NO: 56906 - DNA, 21 bp, Homo Sapiens
agctccgaggtgattttcata

SEQ ID NO: 56907 - DNA, 24 bp, Homo Sapiens
tggtagaattctcgcctgccacgc

SEQ ID NO: 56908 - DNA, 16 bp, Homo Sapiens
cacgtcggggtcacca

SEQ ID NO: 56909 - DNA, 29 bp, Homo Sapiens
gtgatcgtatagtggttagtactctgcgt

SEQ ID NO: 56910 - DNA, 24 bp, Homo Sapiens
gtgtagtggttatcacgttcgcct

SEQ ID NO: 56911 - DNA, 25 bp, Homo Sapiens
gagttaaagactttttctctgacca

SEQ ID NO: 56912 - DNA, 20 bp, Homo Sapiens
cacatcaccccataaacacc

SEQ ID NO: 56913 - DNA, 17 bp, Homo Sapiens
gtttccgtagtgtagtg

SEQ ID NO: 56914 - DNA, 27 bp, Homo Sapiens
aaatggctgagtgaagcattggactgt

SEQ ID NO: 56915 - DNA, 24 bp, Homo Sapiens
ctgtaaagctaacttagcattaac

SEQ ID NO: 56916 - DNA, 21 bp, Homo Sapiens
gaaaaagtcatggaggccatg

SEQ ID NO: 56917 - DNA, 25 bp, Homo Sapiens
gagtgaagcattggactgtaaatct

SEQ ID NO: 56918 - DNA, 18 bp, Homo Sapiens
agtgaagcattggactgt

SEQ ID NO: 56919 - DNA, 25 bp, Homo Sapiens
ggctcacatcaccccataaacacca

SEQ ID NO: 56920 - DNA, 21 bp, Homo Sapiens
gtggttgtagtccgtgcgaga

SEQ ID NO: 56921 - DNA, 21 bp, Homo Sapiens
tatacccttcccgtactacca

SEQ ID NO: 56922 - DNA, 18 bp, Homo Sapiens
ctaatggataaggcactg

SEQ ID NO: 56923 - DNA, 16 bp, Homo Sapiens
ggtcccatggtgtaat

SEQ ID NO: 56924 - DNA, 28 bp, Homo Sapiens
tgatcgtatagtggttagtactctgcgt

SEQ ID NO: 56925 - DNA, 19 bp, Homo Sapiens
agtcggtagagcatgggac

SEQ ID NO: 56926 - DNA, 20 bp, Homo Sapiens
gctccgaggtgattttcata

SEQ ID NO: 56927 - DNA, 23 bp, Homo Sapiens
gttgtagtccgtgcgagaatacc

SEQ ID NO: 56928 - DNA, 23 bp, Homo Sapiens
atatcattggtcgtggttgtagt

SEQ ID NO: 56929 - DNA, 27 bp, Homo Sapiens
aaacatcagattgtgaatctgacaaca

SEQ ID NO: 56930 - DNA, 17 bp, Homo Sapiens
gcgttggtggtatagtg

SEQ ID NO: 56931 - DNA, 23 bp, Homo Sapiens
gagttaaagactttttctctgac

SEQ ID NO: 56932 - DNA, 17 bp, Homo Sapiens
ggggatgtagctcagtg

SEQ ID NO: 56933 - DNA, 22 bp, Homo Sapiens
gtagtcgtggccgagtggttaa

SEQ ID NO: 56934 - DNA, 20 bp, Homo Sapiens
atggtgagcactctggactc

SEQ ID NO: 56935 - DNA, 24 bp, Homo Sapiens
tggttaggattcggcgctctcacc

SEQ ID NO: 56936 - DNA, 29 bp, Homo Sapiens
ccatggtgtaatggttagcactctggact

SEQ ID NO: 56937 - DNA, 21 bp, Homo Sapiens
gtaatggttagcactctggac

SEQ ID NO: 56938 - DNA, 25 bp, Homo Sapiens
tggtcgtggttgtagtccgtgcgag

SEQ ID NO: 56939 - DNA, 26 bp, Homo Sapiens
gtttccgtagtgtagtggtcatcacg

SEQ ID NO: 56940 - DNA, 23 bp, Homo Sapiens
gtcaggatggccgagcggtctaa

SEQ ID NO: 56941 - DNA, 17 bp, Homo Sapiens
gcgccgctggtgtagtg

SEQ ID NO: 56942 - DNA, 26 bp, Homo Sapiens
gtggttgtagtccgtgcgagaatacc

SEQ ID NO: 56943 - DNA, 27 bp, Homo Sapiens
atttcaacttaacttgaccgctctgac

SEQ ID NO: 56944 - DNA, 27 bp, Homo Sapiens
ctggactctgaatccagcgatccgagt

SEQ ID NO: 56945 - DNA, 18 bp, Homo Sapiens
gtccttgtagtataaact

SEQ ID NO: 56946 - DNA, 21 bp, Homo Sapiens
gttcgattccccgacggggag

SEQ ID NO: 56947 - DNA, 18 bp, Homo Sapiens
gtaaaccaggggtcgcga

SEQ ID NO: 56948 - DNA, 22 bp, Homo Sapiens
attggtcgtggttgtagtccgt

SEQ ID NO: 56949 - DNA, 25 bp, Homo Sapiens
gatttcaacttaacttgaccgctct

SEQ ID NO: 56950 - DNA, 22 bp, Homo Sapiens
cttacgaccccttatttacccc

SEQ ID NO: 56951 - DNA, 19 bp, Homo Sapiens
agtggttagtactctgcgt

SEQ ID NO: 56952 - DNA, 25 bp, Homo Sapiens
tcgtatagtggttagtactctgcgt

SEQ ID NO: 56953 - DNA, 18 bp, Homo Sapiens
gtcacgtcggggtcacca

SEQ ID NO: 56954 - DNA, 17 bp, Homo Sapiens
ccccagcatctccacca

SEQ ID NO: 56955 - DNA, 17 bp, Homo Sapiens
gtcaggatggccgagcg

SEQ ID NO: 56956 - DNA, 21 bp, Homo Sapiens
gtagtccgtgcgagaatacca

SEQ ID NO: 56957 - DNA, 26 bp, Homo Sapiens
aatggctgagtgaagcattggactgt

SEQ ID NO: 56958 - DNA, 22 bp, Homo Sapiens
gcgttggtggtatagtggtgag

SEQ ID NO: 56959 - DNA, 20 bp, Homo Sapiens
gttaaagactttttctctga

SEQ ID NO: 56960 - DNA, 25 bp, Homo Sapiens
tccctggtggtctagtggttaggat

SEQ ID NO: 56961 - DNA, 16 bp, Homo Sapiens
caacttaacttgaccg

SEQ ID NO: 56962 - DNA, 16 bp, Homo Sapiens
gtcaggatggccgagc

SEQ ID NO: 56963 - DNA, 27 bp, Homo Sapiens
gtggagttaaagactttttctctgacc

SEQ ID NO: 56964 - DNA, 23 bp, Homo Sapiens
atagtggttagtactctgcgttg

SEQ ID NO: 56965 - DNA, 26 bp, Homo Sapiens
gcgttggtggtatagtggtaagcata

SEQ ID NO: 56966 - DNA, 16 bp, Homo Sapiens
ggttagtactctgcgt

SEQ ID NO: 56967 - DNA, 22 bp, Homo Sapiens
tcgatccccagcatctccacca

SEQ ID NO: 56968 - DNA, 21 bp, Homo Sapiens
agcactctggactctgaatcc

SEQ ID NO: 56969 - DNA, 25 bp, Homo Sapiens
ggagttaaagactttttctctgacc

SEQ ID NO: 56970 - DNA, 24 bp, Homo Sapiens
agttaaagactttttctctgacca

SEQ ID NO: 56971 - DNA, 30 bp, Homo Sapiens; identical to SEQ ID NO: 7557

SEQ ID NO: 56972 - DNA, 17 bp, Homo Sapiens
tccctggtggtctagtg

SEQ ID NO: 56973 - DNA, 28 bp, Homo Sapiens
cgtggttgtagtccgtgcgagaatacca

SEQ ID NO: 56974 - DNA, 21 bp, Homo Sapiens
gcgttcaggtcgcagtctccc

SEQ ID NO: 56975 - DNA, 23 bp, Homo Sapiens
ggttagcactctggactctgaat

SEQ ID NO: 56976 - DNA, 20 bp, Homo Sapiens
cagtcggtagagcatcagac

SEQ ID NO: 56977 - DNA, 16 bp, Homo Sapiens
agactttttctctgac

SEQ ID NO: 56978 - DNA, 26 bp, Homo Sapiens
attggtcgtggttgtagtccgtgcga

SEQ ID NO: 56979 - DNA, 17 bp, Homo Sapiens
attggtcgtggttgtag

SEQ ID NO: 56980 - DNA, 22 bp, Homo Sapiens
ctgccacgcgggaggcccgggt

SEQ ID NO: 56981 - DNA, 17 bp, Homo Sapiens
tcacgtcggggtcacca

SEQ ID NO: 56982 - DNA, 29 bp, Homo Sapiens
taaaatggctgagtgaagcattggactgt

SEQ ID NO: 56983 - DNA, 23 bp, Homo Sapiens
gcccccatgtctaacaacatggc

SEQ ID NO: 56984 - DNA, 20 bp, Homo Sapiens
ggctctgtggcttagttggc

SEQ ID NO: 56985 - DNA, 27 bp, Homo Sapiens
tcgtatagtggttagtactctgcgttg

SEQ ID NO: 56986 - DNA, 20 bp, Homo Sapiens
gcatgggtggttcagtggta

SEQ ID NO: 56987 - DNA, 28 bp, Homo Sapiens
aaatggctgagtgaagcattggactgta

SEQ ID NO: 56988 - DNA, 16 bp, Homo Sapiens
cccagcatctccacca

SEQ ID NO: 56989 - DNA, 20 bp, Homo Sapiens
gggggattagctcaaatggt

SEQ ID NO: 56990 - DNA, 22 bp, Homo Sapiens
gttcgattcccggtcagggaac

SEQ ID NO: 56991 - DNA, 20 bp, Homo Sapiens
gacgaggtggccgagtggtt

SEQ ID NO: 56992 - DNA, 30 bp, Homo Sapiens; identical to SEQ ID NO: 10862

SEQ ID NO: 56993 - DNA, 16 bp, Homo Sapiens
acttgaccgctctgac

SEQ ID NO: 56994 - DNA, 21 bp, Homo Sapiens
tcagtcggtagagcatcagac

SEQ ID NO: 56995 - DNA, 23 bp, Homo Sapiens
atcgtatagtggttagtactctg

SEQ ID NO: 56996 - DNA, 22 bp, Homo Sapiens
atcattggtcgtggttgtagtc

SEQ ID NO: 56997 - DNA, 21 bp, Homo Sapiens
gttaaagactttttctctgac

SEQ ID NO: 56998 - DNA, 28 bp, Homo Sapiens
gatttcaacttaacttgaccgctctgac

SEQ ID NO: 56999 - DNA, 25 bp, Homo Sapiens
ggtagcgtggccgagtggtctaagg

SEQ ID NO: 57000 - DNA, 27 bp, Homo Sapiens
attggtcgtggttgtagtccgtgcgag

SEQ ID NO: 57001 - DNA, 19 bp, Homo Sapiens
gccccggtggcctaatgga

SEQ ID NO: 57002 - DNA, 22 bp, Homo Sapiens
tatagtggttagtactctgcgt

SEQ ID NO: 57003 - DNA, 26 bp, Homo Sapiens
ttggtcgtggttgtagtccgtgcgag

SEQ ID NO: 57004 - DNA, 17 bp, Homo Sapiens
ggtagcgtggccgagcg

SEQ ID NO: 57005 - DNA, 30 bp, Homo Sapiens; identical to SEQ ID NO: 6404

SEQ ID NO: 57006 - DNA, 17 bp, Homo Sapiens
tggttaggattcggcgc

SEQ ID NO: 57007 - DNA, 22 bp, Homo Sapiens
agttaaagactttttctctgac

SEQ ID NO: 57008 - DNA, 30 bp, Homo Sapiens; identical to SEQ ID NO: 24007

SEQ ID NO: 57009 - DNA, 18 bp, Homo Sapiens
gtcaggatggccgagcgg

SEQ ID NO: 57010 - DNA, 18 bp, Homo Sapiens
atcacgtcggggtcacca

SEQ ID NO: 57011 - DNA, 24 bp, Homo Sapiens
gtcaggatggccgagcggtctaag

SEQ ID NO: 57012 - DNA, 20 bp, Homo Sapiens
agtggtagagcatttgactg

SEQ ID NO: 57013 - DNA, 29 bp, Homo Sapiens
gtcgtggttgtagtccgtgcgagaatacc

SEQ ID NO: 57014 - DNA, 28 bp, Homo Sapiens
gcgttggtggtatagtggtgagcatagc

SEQ ID NO: 57015 - DNA, 25 bp, Homo Sapiens
ttcaacttaacttgaccgctctgac

SEQ ID NO: 57016 - DNA, 24 bp, Homo Sapiens
gcccggatagctcagtcggtagag

SEQ ID NO: 57017 - DNA, 25 bp, Homo Sapiens
ggggttaggcctctttttaccacca

SEQ ID NO: 57018 - DNA, 24 bp, Homo Sapiens
tatagtggttagtactctgcgttg

SEQ ID NO: 57019 - DNA, 26 bp, Homo Sapiens
ggttccatagtgtagtggttatcacg

SEQ ID NO: 57020 - DNA, 22 bp, Homo Sapiens
tgagtgaagcattggactgtaa

SEQ ID NO: 57021 - DNA, 30 bp, Homo Sapiens; identical to SEQ ID NO: 27367

SEQ ID NO: 57022 - DNA, 18 bp, Homo Sapiens
atggttagcactctggac

SEQ ID NO: 57023 - DNA, 21 bp, Homo Sapiens
ggggatgtagctcagtggtag

SEQ ID NO: 57024 - DNA, 30 bp, Homo Sapiens; identical to SEQ ID NO: 22490

SEQ ID NO: 57025 - DNA, 23 bp, Homo Sapiens
ggtagcgtggccgagcggtctaa

SEQ ID NO: 57026 - DNA, 17 bp, Homo Sapiens
aagactttttctctgac

SEQ ID NO: 57027 - DNA, 22 bp, Homo Sapiens
ggtagcgtggccgagtggtcta

SEQ ID NO: 57028 - DNA, 20 bp, Homo Sapiens
gcgccgctggtgtagtggta

SEQ ID NO: 57029 - DNA, 25 bp, Homo Sapiens
gtttccgtagtgtagtggttatcac

SEQ ID NO: 57030 - DNA, 20 bp, Homo Sapiens
gggggtgtagctcagtggta

SEQ ID NO: 57031 - DNA, 18 bp, Homo Sapiens
aaagactttttctctgac

SEQ ID NO: 57032 - DNA, 24 bp, Homo Sapiens
tcaacttaacttgaccgctctgac

SEQ ID NO: 57033 - DNA, 23 bp, Homo Sapiens
tatcattggtcgtggttgtagtc

SEQ ID NO: 57034 - DNA, 22 bp, Homo Sapiens
ggttcgattccccgacggggag

SEQ ID NO: 57035 - DNA, 26 bp, Homo Sapiens
tttcaacttaacttgaccgctctgac

SEQ ID NO: 57036 - DNA, 21 bp, Homo Sapiens
tggtcgtggttgtagtccgtg

SEQ ID NO: 57037 - DNA, 30 bp, Homo Sapiens; identical to SEQ ID NO: 27558

SEQ ID NO: 57038 - DNA, 23 bp, Homo Sapiens
ggttccatagtgtagtggttatc

SEQ ID NO: 57039 - DNA, 22 bp, Homo Sapiens
tcgaatccgagtcacggcacca

SEQ ID NO: 57040 - DNA, 21 bp, Homo Sapiens
gcatgggtggttcagtggtag

SEQ ID NO: 57041 - DNA, 23 bp, Homo Sapiens
gttcgattccccgacggggagcc

SEQ ID NO: 57042 - DNA, 22 bp, Homo Sapiens
gttcgattccccgacggggagc

SEQ ID NO: 57043 - DNA, 26 bp, Homo Sapiens
gcgttggtggtatagtggtgagcata

SEQ ID NO: 57044 - DNA, 21 bp, Homo Sapiens
agtggttagtactctgcgttg

SEQ ID NO: 57045 - DNA, 27 bp, Homo Sapiens
ttggtcgtggttgtagtccgtgcgaga

SEQ ID NO: 57046 - DNA, 20 bp, Homo Sapiens
tagtggttaggattcggcgc

SEQ ID NO: 57047 - DNA, 19 bp, Homo Sapiens
taaagactttttctctgac

SEQ ID NO: 57048 - DNA, 24 bp, Homo Sapiens
ggttcgattccccgacggggagcc

SEQ ID NO: 57049 - DNA, 24 bp, Homo Sapiens
gcgttggtggtatagtggtgagca

SEQ ID NO: 57050 - DNA, 19 bp, Homo Sapiens
tagaattctcgcctgccac

SEQ ID NO: 57051 - DNA, 18 bp, Homo Sapiens
ggttagtactctgcgttg

SEQ ID NO: 57052 - DNA, 24 bp, Homo Sapiens
gggggtatagctcagtggtagagc

SEQ ID NO: 57053 - DNA, 23 bp, Homo Sapiens
gcgttggtggtatagtggttagc

SEQ ID NO: 57054 - DNA, 26 bp, Homo Sapiens
gtttccgtagtgtagtggttatcacg

SEQ ID NO: 57055 - DNA, 22 bp, Homo Sapiens
ctgtcacgcgggagaccggggt

SEQ ID NO: 57056 - DNA, 26 bp, Homo Sapiens
atagctcagtggtagagcatttgact

SEQ ID NO: 57057 - DNA, 28 bp, Homo Sapiens
atttcaacttaacttgaccgctctgacc

SEQ ID NO: 57058 - DNA, 20 bp, Homo Sapiens
gcattggtggttcagtggta

SEQ ID NO: 57059 - DNA, 18 bp, Homo Sapiens
gtggttagtactctgcgt

SEQ ID NO: 57060 - DNA, 23 bp, Homo Sapiens
gagatttcaacttaacttgaccg

SEQ ID NO: 57061 - DNA, 22 bp, Homo Sapiens
ctgagtgaagcattggactgta

SEQ ID NO: 57062 - DNA, 30 bp, Homo Sapiens; identical to SEQ ID NO: 6208

SEQ ID NO: 57063 - DNA, 20 bp, Homo Sapiens
tgagtgaagcattggactgt

SEQ ID NO: 57064 - DNA, 23 bp, Homo Sapiens
ggggatgtagctcagtggtagag

SEQ ID NO: 57065 - DNA, 21 bp, Homo Sapiens
atggttagcactctggactct

SEQ ID NO: 57066 - DNA, 20 bp, Homo Sapiens
gatttcaacttaacttgacc

SEQ ID NO: 57067 - DNA, 20 bp, Homo Sapiens
ggggatgtagctcagtggta

SEQ ID NO: 57068 - DNA, 24 bp, Homo Sapiens
gttgtagtccgtgcgagaatacca

SEQ ID NO: 57069 - DNA, 19 bp, Homo Sapiens
ggtcccatggtgtaatggt

SEQ ID NO: 57070 - DNA, 17 bp, Homo Sapiens
aacttgaccgctctgac

SEQ ID NO: 57071 - DNA, 23 bp, Homo Sapiens
gtagtcgtggccgagtggttaag

SEQ ID NO: 57072 - DNA, 25 bp, Homo Sapiens
gtgtaatggttagcactctggactc

SEQ ID NO: 57073 - DNA, 23 bp, Homo Sapiens
attggtcgtggttgtagtccgtg

SEQ ID NO: 57074 - DNA, 18 bp, Homo Sapiens
taacttgaccgctctgac

SEQ ID NO: 57075 - DNA, 18 bp, Homo Sapiens
tccccagtacctccacca

SEQ ID NO: 57076 - DNA, 25 bp, Homo Sapiens
attggtcgtggttgtagtccgtgcg

SEQ ID NO: 57077 - DNA, 20 bp, Homo Sapiens
ggccggttagctcagttggt

SEQ ID NO: 57078 - DNA, 23 bp, Homo Sapiens
gttaaagactttttctctgacca

SEQ ID NO: 57079 - DNA, 17 bp, Homo Sapiens
tggttagtactctgcgt

SEQ ID NO: 57080 - DNA, 23 bp, Homo Sapiens
caacttaacttgaccgctctgac

SEQ ID NO: 57081 - DNA, 24 bp, Homo Sapiens
ggcgcggtggccaagtggtaaggc

SEQ ID NO: 57082 - DNA, 23 bp, Homo Sapiens
gtaatggttagcactctggactc

SEQ ID NO: 57083 - DNA, 27 bp, Homo Sapiens
tttcaacttaacttgaccgctctgacc

SEQ ID NO: 57084 - DNA, 26 bp, Homo Sapiens
ttcaacttaacttgaccgctctgacc

SEQ ID NO: 57085 - DNA, 30 bp, Homo Sapiens; identical to SEQ ID NO: 19439

SEQ ID NO: 57086 - DNA, 22 bp, Homo Sapiens
gttaaagactttttctctgacc

SEQ ID NO: 57087 - DNA, 20 bp, Homo Sapiens
gtctctgtggcgcaatcggt

SEQ ID NO: 57088 - DNA, 20 bp, Homo Sapiens
tagtggttagtactctgcgt

SEQ ID NO: 57089 - DNA, 24 bp, Homo Sapiens
gagttaaagactttttctctgacc

SEQ ID NO: 57090 - DNA, 16 bp, Homo Sapiens
gactttttctctgacc

SEQ ID NO: 57091 - DNA, 22 bp, Homo Sapiens
aacttaacttgaccgctctgac

SEQ ID NO: 57092 - DNA, 19 bp, Homo Sapiens
ttaacttgaccgctctgac

SEQ ID NO: 57093 - DNA, 24 bp, Homo Sapiens
ggtagcgtggccgagcggtctaag

SEQ ID NO: 57094 - DNA, 19 bp, Homo Sapiens
ggctctgtggcgcaatgga

SEQ ID NO: 57095 - DNA, 19 bp, Homo Sapiens
gaccgcgtggcctaatgga

SEQ ID NO: 57096 - DNA, 19 bp, Homo Sapiens
tggtagaattctcgcctgc

SEQ ID NO: 57097 - DNA, 25 bp, Homo Sapiens
ggtagcgtggccgagcggtctaagg

SEQ ID NO: 57098 - DNA, 22 bp, Homo Sapiens
ttaaagactttttctctgacca

SEQ ID NO: 57099 - DNA, 29 bp, Homo Sapiens
cattggtcgtggttgtagtccgtgcgaga

SEQ ID NO: 57100 - DNA, 19 bp, Homo Sapiens
gagtgaagcattggactgt

SEQ ID NO: 57101 - DNA, 29 bp, Homo Sapiens
atttcaacttaacttgaccgctctgacca

SEQ ID NO: 57102 - DNA, 17 bp, Homo Sapiens
acttgaccgctctgacc

SEQ ID NO: 57103 - DNA, 23 bp, Homo Sapiens
agttaaagactttttctctgacc

SEQ ID NO: 57104 - DNA, 22 bp, Homo Sapiens
ggtagcgtggccgagcggtcta

SEQ ID NO: 57105 - DNA, 30 bp, Homo Sapiens; identical to SEQ ID NO: 27986

SEQ ID NO: 57106 - DNA, 26 bp, Homo Sapiens
cgtatagtggttagtactctgcgttg

SEQ ID NO: 57107 - DNA, 17 bp, Homo Sapiens
tccgggtgccccctcca

SEQ ID NO: 57108 - DNA, 21 bp, Homo Sapiens
gtggttagtactctgcgttgt

SEQ ID NO: 57109 - DNA, 19 bp, Homo Sapiens
gacccagtggcctaatgga

SEQ ID NO: 57110 - DNA, 25 bp, Homo Sapiens
tcaacttaacttgaccgctctgacc

SEQ ID NO: 57111 - DNA, 23 bp, Homo Sapiens
tagtggttagtactctgcgttgt

SEQ ID NO: 57112 - DNA, 20 bp, Homo Sapiens
tggttagtactctgcgttgt

SEQ ID NO: 57113 - DNA, 19 bp, Homo Sapiens
gccccagtggcctaatgga

SEQ ID NO: 57114 - DNA, 22 bp, Homo Sapiens
tagtggttagtactctgcgttg

SEQ ID NO: 57115 - DNA, 17 bp, Homo Sapiens
agactttttctctgacc

SEQ ID NO: 57116 - DNA, 19 bp, Homo Sapiens
tggttagtactctgcgttg

SEQ ID NO: 57117 - DNA, 21 bp, Homo Sapiens
tgagtgaagcattggactgta

SEQ ID NO: 57118 - DNA, 20 bp, Homo Sapiens
gtggttagtactctgcgttg

SEQ ID NO: 57119 - DNA, 21 bp, Homo Sapiens
ttaaagactttttctctgacc

SEQ ID NO: 57120 - DNA, 18 bp, Homo Sapiens
aagactttttctctgacc

SEQ ID NO: 57121 - DNA, 19 bp, Homo Sapiens
ggccgcgtggcctaatgga

SEQ ID NO: 57122 - DNA, 27 bp, Homo Sapiens
ttcaacttaacttgaccgctctgacca

SEQ ID NO: 57123 - DNA, 20 bp, Homo Sapiens
atggttagcactctggactc

SEQ ID NO: 57124 - DNA, 19 bp, Homo Sapiens
aaagactttttctctgacc

SEQ ID NO: 57125 - DNA, 19 bp, Homo Sapiens
ggctccgtggcgcaatgga

SEQ ID NO: 57126 - DNA, 24 bp, Homo Sapiens
gttcgattccccgacggggagcca

SEQ ID NO: 57127 - DNA, 20 bp, Homo Sapiens
aaagactttttctctgacca

SEQ ID NO: 57128 - DNA, 19 bp, Homo Sapiens
atggttagcactctggact

SEQ ID NO: 57129 - DNA, 19 bp, Homo Sapiens
gggccagtggcgcaatgga

SEQ ID NO: 57130 - DNA, 30 bp, Homo Sapiens; identical to SEQ ID NO: 25700

SEQ ID NO: 57131 - DNA, 24 bp, Homo Sapiens
caacttaacttgaccgctctgacc

SEQ ID NO: 57132 - DNA, 26 bp, Homo Sapiens
tcaacttaacttgaccgctctgacca

SEQ ID NO: 57133 - DNA, 20 bp, Homo Sapiens
taaagactttttctctgacc

SEQ ID NO: 57134 - DNA, 19 bp, Homo Sapiens
taacttgaccgctctgacc

SEQ ID NO: 57135 - DNA, 22 bp, Homo Sapiens
ggggatgtagctcagtggtaga

SEQ ID NO: 57136 - DNA, 18 bp, Homo Sapiens
aacttgaccgctctgacc

SEQ ID NO: 57137 - DNA, 29 bp, Homo Sapiens
gatttcaacttaacttgaccgctctgacc

SEQ ID NO: 57138 - DNA, 28 bp, Homo Sapiens
attggtcgtggttgtagtccgtgcgaga

SEQ ID NO: 57139 - DNA, 23 bp, Homo Sapiens
aacttaacttgaccgctctgacc

SEQ ID NO: 57140 - DNA, 28 bp, Homo Sapiens
tttcaacttaacttgaccgctctgacca

SEQ ID NO: 57141 - DNA, 25 bp, Homo Sapiens
caacttaacttgaccgctctgacca

SEQ ID NO: 57142 - DNA, 24 bp, Homo Sapiens
aacttaacttgaccgctctgacca

SEQ ID NO: 57143 - DNA, 31 bp, Homo Sapiens; identical to SEQ ID NO: 18802

SEQ ID NO: 57144 - DNA, 37 bp, Homo Sapiens; identical to SEQ ID NO: 14224

SEQ ID NO: 57145 - DNA, 22 bp, Homo Sapiens
gggttcgactcccggtatggga

SEQ ID NO: 57146 - DNA, 20 bp, Homo Sapiens
gagtggttaaggcattggac

SEQ ID NO: 57147 - DNA, 29 bp, Homo Sapiens
ggcggcccgggttcgactcccggtgtggg

SEQ ID NO: 57148 - DNA, 25 bp, Homo Sapiens
tagtgtagtggttatcacgttcgcc

SEQ ID NO: 57149 - DNA, 38 bp, Homo Sapiens; identical to SEQ ID NO: 33911

SEQ ID NO: 57150 - DNA, 25 bp, Homo Sapiens
aggttcgaatcctgccgactacgcc

SEQ ID NO: 57151 - DNA, 22 bp, Homo Sapiens
gttcgagcctcagagagggcac

SEQ ID NO: 57152 - DNA, 25 bp, Homo Sapiens
gcgggttcgaaccccgtccgtgcct

SEQ ID NO: 57153 - DNA, 18 bp, Homo Sapiens
atcctgctcacagcgcca

SEQ ID NO: 57154 - DNA, 16 bp, Homo Sapiens
ggtagagcagaggact

SEQ ID NO: 57155 - DNA, 31 bp, Homo Sapiens; identical to SEQ ID NO: 18659

SEQ ID NO: 57156 - DNA, 27 bp, Homo Sapiens
gggggtgtagctcagtggtagagcgcg

SEQ ID NO: 57157 - DNA, 23 bp, Homo Sapiens
ttccccgcacaggttcgaatcct

SEQ ID NO: 57158 - DNA, 33 bp, Homo Sapiens; identical to SEQ ID NO: 16830

SEQ ID NO: 57159 - DNA, 17 bp, Homo Sapiens
cagagtggcgcagcgga

SEQ ID NO: 57160 - DNA, 27 bp, Homo Sapiens
aggcggcccgggttcgactcccggtgt

SEQ ID NO: 57161 - DNA, 31 bp, Homo Sapiens; identical to SEQ ID NO: 10480

SEQ ID NO: 57162 - DNA, 33 bp, Homo Sapiens; identical to SEQ ID NO: 8581

SEQ ID NO: 57163 - DNA, 23 bp, Homo Sapiens
gggccagtggcgcaatggataac

SEQ ID NO: 57164 - DNA, 26 bp, Homo Sapiens
tggtgtaatggtaagcactctggact

SEQ ID NO: 57165 - DNA, 29 bp, Homo Sapiens
gtcgctggttcgattccggctcgaaggac

SEQ ID NO: 57166 - DNA, 36 bp, Homo Sapiens; identical to SEQ ID NO: 3549

SEQ ID NO: 57167 - DNA, 38 bp, Homo Sapiens; identical to SEQ ID NO: 7116

SEQ ID NO: 57168 - DNA, 34 bp, Homo Sapiens; identical to SEQ ID NO: 9470

SEQ ID NO: 57169 - DNA, 27 bp, Homo Sapiens
tgagggttcgaatcccttcgtggttgc

SEQ ID NO: 57170 - DNA, 17 bp, Homo Sapiens
tggtcatcacgttcgcc

SEQ ID NO: 57171 - DNA, 19 bp, Homo Sapiens
gttcgattcccggccaatg

SEQ ID NO: 57172 - DNA, 16 bp, Homo Sapiens
cccggtgtgggaacca

SEQ ID NO: 57173 - DNA, 34 bp, Homo Sapiens; identical to SEQ ID NO: 4922

SEQ ID NO: 57174 - DNA, 21 bp, Homo Sapiens
gcaatggatagcgcattggac

SEQ ID NO: 57175 - DNA, 28 bp, Homo Sapiens
cctggtggtctagtggctaggattcggc

SEQ ID NO: 57176 - DNA, 29 bp, Homo Sapiens
ttggtggttcgagcccacccagggacgcc

SEQ ID NO: 57177 - DNA, 16 bp, Homo Sapiens
tagctcagtcggtaga

SEQ ID NO: 57178 - DNA, 27 bp, Homo Sapiens
gcgtgggttcgaatcccatcctcgtcg

SEQ ID NO: 57179 - DNA, 18 bp, Homo Sapiens
tttgggtgcgagaggtcc

SEQ ID NO: 57180 - DNA, 32 bp, Homo Sapiens; identical to SEQ ID NO: 132

SEQ ID NO: 57181 - DNA, 28 bp, Homo Sapiens
gcgccgctggtgtagtggtatcatgcaa

SEQ ID NO: 57182 - DNA, 17 bp, Homo Sapiens
cactgtaaagctaactt

SEQ ID NO: 57183 - DNA, 40 bp, Homo Sapiens; identical to SEQ ID NO: 11506

SEQ ID NO: 57184 - DNA, 24 bp, Homo Sapiens
cgggttcgactcccggtatgggaa

SEQ ID NO: 57185 - DNA, 20 bp, Homo Sapiens
tgtaatggttagcactctgg

SEQ ID NO: 57186 - DNA, 33 bp, Homo Sapiens; identical to SEQ ID NO: 10729

SEQ ID NO: 57187 - DNA, 18 bp, Homo Sapiens
cgagccccacgttgggcg

SEQ ID NO: 57188 - DNA, 23 bp, Homo Sapiens
gggttcgaatcccttcgtggttg

SEQ ID NO: 57189 - DNA, 33 bp, Homo Sapiens; identical to SEQ ID NO: 26788

SEQ ID NO: 57190 - DNA, 29 bp, Homo Sapiens
gctagctcagtcggtagagcatgagactc

SEQ ID NO: 57191 - DNA, 29 bp, Homo Sapiens
taggatggggtgtgataggtggcacggag

SEQ ID NO: 57192 - DNA, 20 bp, Homo Sapiens
cggttaggattcctggtttt

SEQ ID NO: 57193 - DNA, 37 bp, Homo Sapiens; identical to SEQ ID NO: 24651

SEQ ID NO: 57194 - DNA, 27 bp, Homo Sapiens
gtttccgtagtgtagtggttatcacgt

SEQ ID NO: 57195 - DNA, 35 bp, Homo Sapiens; identical to SEQ ID NO: 14588

SEQ ID NO: 57196 - DNA, 26 bp, Homo Sapiens
attggtcgtggttgtagtccgtgcga

SEQ ID NO: 57197 - DNA, 17 bp, Homo Sapiens
tgcccgcatcctccacc

SEQ ID NO: 57198 - DNA, 25 bp, Homo Sapiens
gcctggatagctcagttggtagagc

SEQ ID NO: 57199 - DNA, 22 bp, Homo Sapiens
gggttcgattccccgacgggga

SEQ ID NO: 57200 - DNA, 32 bp, Homo Sapiens; identical to SEQ ID NO: 9989

SEQ ID NO: 57201 - DNA, 17 bp, Homo Sapiens
gcccggatagctcagtc

SEQ ID NO: 57202 - DNA, 16 bp, Homo Sapiens
ggttaaggcattggac

SEQ ID NO: 57203 - DNA, 33 bp, Homo Sapiens; identical to SEQ ID NO: 25909

SEQ ID NO: 57204 - DNA, 30 bp, Homo Sapiens; identical to SEQ ID NO: 1566

SEQ ID NO: 57205 - DNA, 26 bp, Homo Sapiens
cctcggttcgaatccgagtcacggca

SEQ ID NO: 57206 - DNA, 17 bp, Homo Sapiens
ggtagaattctcgcctg

SEQ ID NO: 57207 - DNA, 16 bp, Homo Sapiens
ggccggttagctcagt

SEQ ID NO: 57208 - DNA, 23 bp, Homo Sapiens
tttgggtgcgagaggtcccgggt

SEQ ID NO: 57209 - DNA, 39 bp, Homo Sapiens; identical to SEQ ID NO: 23349

SEQ ID NO: 57210 - DNA, 21 bp, Homo Sapiens
agggattgtgggttcgagtcc

SEQ ID NO: 57211 - DNA, 19 bp, Homo Sapiens
caagtctcggtggaacctc

SEQ ID NO: 57212 - DNA, 29 bp, Homo Sapiens
tcagtcggtagagcatgagactcttaatc

SEQ ID NO: 57213 - DNA, 22 bp, Homo Sapiens
tcgtatagtggttagtactctg

SEQ ID NO: 57214 - DNA, 23 bp, Homo Sapiens
ggttagcactctggactttgaat

SEQ ID NO: 57215 - DNA, 38 bp, Homo Sapiens; identical to SEQ ID NO: 3099

SEQ ID NO: 57216 - DNA, 39 bp, Homo Sapiens; identical to SEQ ID NO: 30826

SEQ ID NO: 57217 - DNA, 31 bp, Homo Sapiens; identical to SEQ ID NO: 31615

SEQ ID NO: 57218 - DNA, 38 bp, Homo Sapiens; identical to SEQ ID NO: 33917

SEQ ID NO: 57219 - DNA, 38 bp, Homo Sapiens; identical to SEQ ID NO: 8486

SEQ ID NO: 57220 - DNA, 45 bp, Homo Sapiens; identical to SEQ ID NO: 19945

SEQ ID NO: 57221 - DNA, 19 bp, Homo Sapiens
gtagtcgtggccgagtggt

SEQ ID NO: 57222 - DNA, 41 bp, Homo Sapiens; identical to SEQ ID NO: 19531

SEQ ID NO: 57223 - DNA, 38 bp, Homo Sapiens; identical to SEQ ID NO: 28300

SEQ ID NO: 57224 - DNA, 22 bp, Homo Sapiens
gttaagatggcagagcccggta

SEQ ID NO: 57225 - DNA, 30 bp, Homo Sapiens; identical to SEQ ID NO: 24039

SEQ ID NO: 57226 - DNA, 27 bp, Homo Sapiens
ggggatgtagctcagtggtagagcgca

SEQ ID NO: 57227 - DNA, 19 bp, Homo Sapiens
cggtagagcatgagactct

SEQ ID NO: 57228 - DNA, 33 bp, Homo Sapiens; identical to SEQ ID NO: 15309

SEQ ID NO: 57229 - DNA, 39 bp, Homo Sapiens; identical to SEQ ID NO: 19940

SEQ ID NO: 57230 - DNA, 22 bp, Homo Sapiens
ggttagcactctggactctgaa

SEQ ID NO: 57231 - DNA, 19 bp, Homo Sapiens
aatcctgccgactacgcca

SEQ ID NO: 57232 - DNA, 32 bp, Homo Sapiens; identical to SEQ ID NO: 42246

SEQ ID NO: 57233 - DNA, 17 bp, Homo Sapiens
cccatatggtctagcgg

SEQ ID NO: 57234 - DNA, 36 bp, Homo Sapiens; identical to SEQ ID NO: 11790

SEQ ID NO: 57235 - DNA, 20 bp, Homo Sapiens
tacgaccccttatttacccc

SEQ ID NO: 57236 - DNA, 28 bp, Homo Sapiens
ggggatgtagctcagtggtagagcgcgc

SEQ ID NO: 57237 - DNA, 33 bp, Homo Sapiens; identical to SEQ ID NO: 22518

SEQ ID NO: 57238 - DNA, 21 bp, Homo Sapiens
gcggcccgggttcgattcccg

SEQ ID NO: 57239 - DNA, 39 bp, Homo Sapiens; identical to SEQ ID NO: 17808

SEQ ID NO: 57240 - DNA, 37 bp, Homo Sapiens; identical to SEQ ID NO: 19938

SEQ ID NO: 57241 - DNA, 20 bp, Homo Sapiens
tcgaatcccagtagagcctc

SEQ ID NO: 57242 - DNA, 19 bp, Homo Sapiens
ggccggttagctcagttgg

SEQ ID NO: 57243 - DNA, 17 bp, Homo Sapiens
tagtcgtggccgagtgg

SEQ ID NO: 57244 - DNA, 41 bp, Homo Sapiens; identical to SEQ ID NO: 18202

SEQ ID NO: 57245 - DNA, 28 bp, Homo Sapiens
ttgagggttcgaatcccttcgtggttgc

SEQ ID NO: 57246 - DNA, 21 bp, Homo Sapiens
gtttccgtagtgtagtggtca

SEQ ID NO: 57247 - DNA, 36 bp, Homo Sapiens; identical to SEQ ID NO: 24045

SEQ ID NO: 57248 - DNA, 26 bp, Homo Sapiens
gggttcgactcccggtgtgggaacca

SEQ ID NO: 57249 - DNA, 47 bp, Homo Sapiens; identical to SEQ ID NO: 9935

SEQ ID NO: 57250 - DNA, 37 bp, Homo Sapiens; identical to SEQ ID NO: 19699

SEQ ID NO: 57251 - DNA, 22 bp, Homo Sapiens
tagagcatgagactcttaatct

SEQ ID NO: 57252 - DNA, 20 bp, Homo Sapiens
agtggttagtactctgcgtt

SEQ ID NO: 57253 - DNA, 17 bp, Homo Sapiens
accgggcggaaacacca

SEQ ID NO: 57254 - DNA, 41 bp, Homo Sapiens; identical to SEQ ID NO: 12419

SEQ ID NO: 57255 - DNA, 32 bp, Homo Sapiens; identical to SEQ ID NO: 12458

SEQ ID NO: 57256 - DNA, 32 bp, Homo Sapiens; identical to SEQ ID NO: 17569

SEQ ID NO: 57257 - DNA, 26 bp, Homo Sapiens
tcaacttaacttgaccgctctgacca

SEQ ID NO: 57258 - DNA, 17 bp, Homo Sapiens
tcctgctcacagcgcca

SEQ ID NO: 57259 - DNA, 16 bp, Homo Sapiens
cctgctcacagcgcca

SEQ ID NO: 57260 - DNA, 16 bp, Homo Sapiens
ccctgctcgctgcgcc

SEQ ID NO: 57261 - DNA, 19 bp, Homo Sapiens
aagtcacgtcggggtcacc

SEQ ID NO: 57262 - DNA, 23 bp, Homo Sapiens
ggttcaagtccctgttcgggcgc

SEQ ID NO: 57263 - DNA, 21 bp, Homo Sapiens
aggtggcccgggttcgactcc

SEQ ID NO: 57264 - DNA, 45 bp, Homo Sapiens; identical to SEQ ID NO: 32206

SEQ ID NO: 57265 - DNA, 34 bp, Homo Sapiens; identical to SEQ ID NO: 5860

SEQ ID NO: 57266 - DNA, 42 bp, Homo Sapiens; identical to SEQ ID NO: 41602

SEQ ID NO: 57267 - DNA, 18 bp, Homo Sapiens
ttcaggtcgcagtctccc

SEQ ID NO: 57268 - DNA, 23 bp, Homo Sapiens
atggttagcactctggactctga

SEQ ID NO: 57269 - DNA, 23 bp, Homo Sapiens
ttgggtgcgagaggtcccgggtt

SEQ ID NO: 57270 - DNA, 27 bp, Homo Sapiens
cgcgggttcgatccccgtacgggccac

SEQ ID NO: 57271 - DNA, 46 bp, Homo Sapiens; identical to SEQ ID NO: 7964

SEQ ID NO: 57272 - DNA, 39 bp, Homo Sapiens; identical to SEQ ID NO: 8314

SEQ ID NO: 57273 - DNA, 47 bp, Homo Sapiens; identical to SEQ ID NO: 8258

SEQ ID NO: 57274 - DNA, 21 bp, Homo Sapiens
tcgaatcccaccgctgccacc

SEQ ID NO: 57275 - DNA, 22 bp, Homo Sapiens
aagattgagggttcgagtccct

SEQ ID NO: 57276 - DNA, 29 bp, Homo Sapiens
cactctggactttgaatccagcgatccga

SEQ ID NO: 57277 - DNA, 31 bp, Homo Sapiens; identical to SEQ ID NO: 38652

SEQ ID NO: 57278 - DNA, 33 bp, Homo Sapiens; identical to SEQ ID NO: 20345

SEQ ID NO: 57279 - DNA, 34 bp, Homo Sapiens; identical to SEQ ID NO: 30117

SEQ ID NO: 57280 - DNA, 18 bp, Homo Sapiens
acttgaccgctctgacca

SEQ ID NO: 57281 - DNA, 17 bp, Homo Sapiens
ccctgctcgctgcgcca

SEQ ID NO: 57282 - DNA, 30 bp, Homo Sapiens; identical to SEQ ID NO: 25296

SEQ ID NO: 57283 - DNA, 25 bp, Homo Sapiens
tcggctgttaaccgaaaggttggtg

SEQ ID NO: 57284 - DNA, 22 bp, Homo Sapiens
tccccgcgcaggttcgaatcct

SEQ ID NO: 57285 - DNA, 38 bp, Homo Sapiens; identical to SEQ ID NO: 2930

SEQ ID NO: 57286 - DNA, 27 bp, Homo Sapiens
cggttaggattcctggttttcacccag

SEQ ID NO: 57287 - DNA, 18 bp, Homo Sapiens
aatcctgctcacagcgcc

SEQ ID NO: 57288 - DNA, 30 bp, Homo Sapiens; identical to SEQ ID NO: 14908

SEQ ID NO: 57289 - DNA, 45 bp, Homo Sapiens; identical to SEQ ID NO: 4700

SEQ ID NO: 57290 - DNA, 32 bp, Homo Sapiens; identical to SEQ ID NO: 5157

SEQ ID NO: 57291 - DNA, 32 bp, Homo Sapiens; identical to SEQ ID NO: 8715

SEQ ID NO: 57292 - DNA, 37 bp, Homo Sapiens; identical to SEQ ID NO: 8944

SEQ ID NO: 57293 - DNA, 25 bp, Homo Sapiens
cgtgttcaaatcacgtcggggtcac

SEQ ID NO: 57294 - DNA, 37 bp, Homo Sapiens; identical to SEQ ID NO: 36634

SEQ ID NO: 57295 - DNA, 21 bp, Homo Sapiens
gcaatggtagcgcgtctgact

SEQ ID NO: 57296 - DNA, 43 bp, Homo Sapiens; identical to SEQ ID NO: 41033

SEQ ID NO: 57297 - DNA, 26 bp, Homo Sapiens
gtgatcgtatagtggttagtactctg

SEQ ID NO: 57298 - DNA, 26 bp, Homo Sapiens
cgtgatcgtatagtggttagtactct

SEQ ID NO: 57299 - DNA, 18 bp, Homo Sapiens
tggtagaattctcgcctg

SEQ ID NO: 57300 - DNA, 22 bp, Homo Sapiens
aatggttagcactctggactct

SEQ ID NO: 57301 - DNA, 30 bp, Homo Sapiens; identical to SEQ ID NO: 18658

SEQ ID NO: 57302 - DNA, 18 bp, Homo Sapiens
gtggttatcacgttcgcc

SEQ ID NO: 57303 - DNA, 18 bp, Homo Sapiens
ggctagctcagtcggtag

SEQ ID NO: 57304 - DNA, 27 bp, Homo Sapiens
ctccgaggtgattttcatattgaattg

SEQ ID NO: 57305 - DNA, 28 bp, Homo Sapiens
gggggtgtagctcagtggtagagcgcgt

SEQ ID NO: 57306 - DNA, 37 bp, Homo Sapiens; identical to SEQ ID NO: 25707

SEQ ID NO: 57307 - DNA, 29 bp, Homo Sapiens
ctgcgtgttcgaatcacgtcggggtcacc

SEQ ID NO: 57308 - DNA, 22 bp, Homo Sapiens
ttcaaatcacgtcggggtcacc

SEQ ID NO: 57309 - DNA, 24 bp, Homo Sapiens
cagtggtagaattctcgcctgcca

SEQ ID NO: 57310 - DNA, 39 bp, Homo Sapiens; identical to SEQ ID NO: 3177

SEQ ID NO: 57311 - DNA, 17 bp, Homo Sapiens
gtggtatcatgcaagat

SEQ ID NO: 57312 - DNA, 46 bp, Homo Sapiens; identical to SEQ ID NO: 10365

SEQ ID NO: 57313 - DNA, 42 bp, Homo Sapiens; identical to SEQ ID NO: 19943

SEQ ID NO: 57314 - DNA, 21 bp, Homo Sapiens
gtcggtagagcatgagactct

SEQ ID NO: 57315 - DNA, 29 bp, Homo Sapiens
cctggtggtctagtggttaggattcggcg

SEQ ID NO: 57316 - DNA, 19 bp, Homo Sapiens
attgcaggttcgagtcctg

SEQ ID NO: 57317 - DNA, 26 bp, Homo Sapiens
ttaaccgaaaggttggtggttcgagc

SEQ ID NO: 57318 - DNA, 24 bp, Homo Sapiens
gtctagtggttaggattcggcgct

SEQ ID NO: 57319 - DNA, 32 bp, Homo Sapiens; identical to SEQ ID NO: 8225

SEQ ID NO: 57320 - DNA, 29 bp, Homo Sapiens
gtttccgtagtgtagcggttatcacattc

SEQ ID NO: 57321 - DNA, 19 bp, Homo Sapiens
cagtggtagaattctcgcc

SEQ ID NO: 57322 - DNA, 24 bp, Homo Sapiens
gtgtagtggttatcacgttcgcct

SEQ ID NO: 57323 - DNA, 28 bp, Homo Sapiens
ttggtggttcagtggtagaattctcgcc

SEQ ID NO: 57324 - DNA, 18 bp, Homo Sapiens
gcgtggccgagcggtcta

SEQ ID NO: 57325 - DNA, 22 bp, Homo Sapiens
gggttcgattccccgacgggga

SEQ ID NO: 57326 - DNA, 26 bp, Homo Sapiens
tcggtagagcatgggactcttaatcc

SEQ ID NO: 57327 - DNA, 32 bp, Homo Sapiens; identical to SEQ ID NO: 18449

SEQ ID NO: 57328 - DNA, 23 bp, Homo Sapiens
tcagtggtagaattctcgcctgc

SEQ ID NO: 57329 - DNA, 21 bp, Homo Sapiens
gcttcaaacctgccggggctt

SEQ ID NO: 57330 - DNA, 23 bp, Homo Sapiens
ccggatagctcagtcggtagagc

SEQ ID NO: 57331 - DNA, 17 bp, Homo Sapiens
aggattcggcgctctca

SEQ ID NO: 57332 - DNA, 25 bp, Homo Sapiens
gtggcgcagcggaagcgtgctgggc

SEQ ID NO: 57333 - DNA, 33 bp, Homo Sapiens; identical to SEQ ID NO: 16890

SEQ ID NO: 57334 - DNA, 25 bp, Homo Sapiens
gtgtagtggttatcacgttcgcctc

SEQ ID NO: 57335 - DNA, 19 bp, Homo Sapiens
cagtcggtagagcatggga

SEQ ID NO: 57336 - DNA, 23 bp, Homo Sapiens
actttgaatccagcgatccgagt

SEQ ID NO: 57337 - DNA, 36 bp, Homo Sapiens; identical to SEQ ID NO: 27564

SEQ ID NO: 57338 - DNA, 18 bp, Homo Sapiens
gtggtagagcatttgact

SEQ ID NO: 57339 - DNA, 40 bp, Homo Sapiens; identical to SEQ ID NO: 8315

SEQ ID NO: 57340 - DNA, 21 bp, Homo Sapiens
tcagtcggtagagcatgggac

SEQ ID NO: 57341 - DNA, 27 bp, Homo Sapiens
gttcagtggtagaattctcgcctgcca

SEQ ID NO: 57342 - DNA, 17 bp, Homo Sapiens
agactttttctctgacc

SEQ ID NO: 57343 - DNA, 22 bp, Homo Sapiens
tgaatccagcgatccgagttca

SEQ ID NO: 57344 - DNA, 27 bp, Homo Sapiens
tcgtggttgtagtccgtgcgagaatac

SEQ ID NO: 57345 - DNA, 19 bp, Homo Sapiens
actctggactctgaatcca

SEQ ID NO: 57346 - DNA, 22 bp, Homo Sapiens
agtggtagaattctcgcctgcc

SEQ ID NO: 57347 - DNA, 35 bp, Homo Sapiens; identical to SEQ ID NO: 16852

SEQ ID NO: 57348 - DNA, 18 bp, Homo Sapiens
cagtggtagaattctcgc

SEQ ID NO: 57349 - DNA, 33 bp, Homo Sapiens; identical to SEQ ID NO: 30462

SEQ ID NO: 57350 - DNA, 23 bp, Homo Sapiens
ccataacccagaggtcgatggat

SEQ ID NO: 57351 - DNA, 35 bp, Homo Sapiens; identical to SEQ ID NO: 4153

SEQ ID NO: 57352 - DNA, 31 bp, Homo Sapiens; identical to SEQ ID NO: 2233

SEQ ID NO: 57353 - DNA, 23 bp, Homo Sapiens
agcagcttcaaacctgccggggc

SEQ ID NO: 57354 - DNA, 27 bp, Homo Sapiens
ggtggttcagtggtagaattctcgcct

SEQ ID NO: 57355 - DNA, 21 bp, Homo Sapiens
tcagtcggtagagcatcagac

SEQ ID NO: 57356 - DNA, 23 bp, Homo Sapiens
gttcagtggtagaattctcgcct

SEQ ID NO: 57357 - DNA, 19 bp, Homo Sapiens
gtcggtagagcatgggact

SEQ ID NO: 57358 - DNA, 33 bp, Homo Sapiens; identical to SEQ ID NO: 22493

SEQ ID NO: 57359 - DNA, 26 bp, Homo Sapiens
agctcagtcggtagagcatgggactc

SEQ ID NO: 57360 - DNA, 25 bp, Homo Sapiens
acatggtctagcggttaggattcct

SEQ ID NO: 57361 - DNA, 19 bp, Homo Sapiens
gtagaattctcgcctgcca

SEQ ID NO: 57362 - DNA, 22 bp, Homo Sapiens
gtcaggatggccgagcggtcta

SEQ ID NO: 57363 - DNA, 28 bp, Homo Sapiens
tggtggagttaaagactttttctctgac

SEQ ID NO: 57364 - DNA, 26 bp, Homo Sapiens
gccgtgatcgtatagtggttagtact

SEQ ID NO: 57365 - DNA, 22 bp, Homo Sapiens
gtcaggatggccgagtggtcta

SEQ ID NO: 57366 - DNA, 22 bp, Homo Sapiens
tttccgtagtgtagtggtcatc

SEQ ID NO: 57367 - DNA, 17 bp, Homo Sapiens
tagaattctcgcctgcc

SEQ ID NO: 57368 - DNA, 31 bp, Homo Sapiens; identical to SEQ ID NO: 25477

SEQ ID NO: 57369 - DNA, 36 bp, Homo Sapiens; identical to SEQ ID NO: 11014

SEQ ID NO: 57370 - DNA, 25 bp, Homo Sapiens
tggtctagtggttaggattcggcgc

SEQ ID NO: 57371 - DNA, 33 bp, Homo Sapiens; identical to SEQ ID NO: 25533

SEQ ID NO: 57372 - DNA, 32 bp, Homo Sapiens; identical to SEQ ID NO: 15365

SEQ ID NO: 57373 - DNA, 21 bp, Homo Sapiens
tcagtggtagaattctcgcct

SEQ ID NO: 57374 - DNA, 25 bp, Homo Sapiens
ggagttaaagactttttctctgacc

SEQ ID NO: 57375 - DNA, 19 bp, Homo Sapiens
tcggtagagcatgggactc

SEQ ID NO: 57376 - DNA, 33 bp, Homo Sapiens; identical to SEQ ID NO: 13256

SEQ ID NO: 57377 - DNA, 18 bp, Homo Sapiens
tcagaaggctgcgtgttc

SEQ ID NO: 57378 - DNA, 18 bp, Homo Sapiens
gtcccacctggggtgcca

SEQ ID NO: 57379 - DNA, 27 bp, Homo Sapiens
gtcggtagagcatgggactcttaatcc

SEQ ID NO: 57380 - DNA, 18 bp, Homo Sapiens
aggatggccgagcggtct

SEQ ID NO: 57381 - DNA, 32 bp, Homo Sapiens; identical to SEQ ID NO: 18195

SEQ ID NO: 57382 - DNA, 26 bp, Homo Sapiens
ggagaccggggttcgattccccgacg

SEQ ID NO: 57383 - DNA, 16 bp, Homo Sapiens
ggtatgattctcgctt

SEQ ID NO: 57384 - DNA, 34 bp, Homo Sapiens; identical to SEQ ID NO: 27562

SEQ ID NO: 57385 - DNA, 25 bp, Homo Sapiens
tggtctaggggtatgattctcgctt

SEQ ID NO: 57386 - DNA, 16 bp, Homo Sapiens
cggtagagcatgggac

SEQ ID NO: 57387 - DNA, 25 bp, Homo Sapiens
gtagtcgtggccgagtggttaaggc

SEQ ID NO: 57388 - DNA, 25 bp, Homo Sapiens
cgtatagtggttagtactctgcgtt

SEQ ID NO: 57389 - DNA, 21 bp, Homo Sapiens
gtggtagaattctcgcctgcc

SEQ ID NO: 57390 - DNA, 36 bp, Homo Sapiens; identical to SEQ ID NO: 16838

SEQ ID NO: 57391 - DNA, 37 bp, Homo Sapiens; identical to SEQ ID NO: 10522

SEQ ID NO: 57392 - DNA, 17 bp, Homo Sapiens
tcggtagagcatgggac

SEQ ID NO: 57393 - DNA, 18 bp, Homo Sapiens
ggggatgtagctcagtgg

SEQ ID NO: 57394 - DNA, 20 bp, Homo Sapiens
cagtggtagaattctcgcct

SEQ ID NO: 57395 - DNA, 21 bp, Homo Sapiens
agcactctggactctgaatcc

SEQ ID NO: 57396 - DNA, 30 bp, Homo Sapiens; identical to SEQ ID NO: 11496

SEQ ID NO: 57397 - DNA, 27 bp, Homo Sapiens
ggtggagttaaagactttttctctgac

SEQ ID NO: 57398 - DNA, 18 bp, Homo Sapiens
cattcttgcgacccgggt

SEQ ID NO: 57399 - DNA, 29 bp, Homo Sapiens
tggtggagttaaagactttttctctgacc

SEQ ID NO: 57400 - DNA, 17 bp, Homo Sapiens
acatcagattgtgaatc

SEQ ID NO: 57401 - DNA, 23 bp, Homo Sapiens
agtggtagaattctcgcctgcca

SEQ ID NO: 57402 - DNA, 23 bp, Homo Sapiens
ctttgaatccagcgatccgagtt

SEQ ID NO: 57403 - DNA, 33 bp, Homo Sapiens; identical to SEQ ID NO: 12208

SEQ ID NO: 57404 - DNA, 19 bp, Homo Sapiens
tggttagtactctgcgttg

SEQ ID NO: 57405 - DNA, 21 bp, Homo Sapiens
gtcaggatggccgagcggtct

SEQ ID NO: 57406 - DNA, 20 bp, Homo Sapiens
cagtcggtagagcatgggac

SEQ ID NO: 57407 - DNA, 22 bp, Homo Sapiens
ttgtaaaccaggggtcgcgagt

SEQ ID NO: 57408 - DNA, 27 bp, Homo Sapiens
gagtggcgcagcggaagcgtgctgggc

SEQ ID NO: 57409 - DNA, 18 bp, Homo Sapiens
gtcggtagagcatgggac

SEQ ID NO: 57410 - DNA, 20 bp, Homo Sapiens
tcgaatcccatcctcgtcgc

SEQ ID NO: 57411 - DNA, 20 bp, Homo Sapiens
gtcggtagagcatgggactc

SEQ ID NO: 57412 - DNA, 28 bp, Homo Sapiens
ccggctagctcagtcggtagagcatggg

SEQ ID NO: 57413 - DNA, 32 bp, Homo Sapiens; identical to SEQ ID NO: 17958

SEQ ID NO: 57414 - DNA, 19 bp, Homo Sapiens
cctgtcacgcgggagaccg

SEQ ID NO: 57415 - DNA, 39 bp, Homo Sapiens; identical to SEQ ID NO: 24832

SEQ ID NO: 57416 - DNA, 16 bp, Homo Sapiens
agaaggctgcgtgttc

SEQ ID NO: 57417 - DNA, 16 bp, Homo Sapiens
gtcaggatggccgagt

SEQ ID NO: 57418 - DNA, 21 bp, Homo Sapiens
tcaaatcccggacgagccccc

SEQ ID NO: 57419 - DNA, 27 bp, Homo Sapiens
tatggtctagcggttaggattcctggt

SEQ ID NO: 57420 - DNA, 34 bp, Homo Sapiens; identical to SEQ ID NO: 18702

SEQ ID NO: 57421 - DNA, 24 bp, Homo Sapiens
ggctgttaaccgaaaggttggtgg

SEQ ID NO: 57422 - DNA, 17 bp, Homo Sapiens
catgggactcttcatcc

SEQ ID NO: 57423 - DNA, 22 bp, Homo Sapiens
cggaagcgtgctgggcccataa

SEQ ID NO: 57424 - DNA, 24 bp, Homo Sapiens
cctggtggtctagtggttaggatt

SEQ ID NO: 57425 - DNA, 38 bp, Homo Sapiens; identical to SEQ ID NO: 9926

SEQ ID NO: 57426 - DNA, 16 bp, Homo Sapiens
ccattcttgcgacccg

SEQ ID NO: 57427 - DNA, 24 bp, Homo Sapiens
tggttaggattcggcgctctcacc

SEQ ID NO: 57428 - DNA, 18 bp, Homo Sapiens
gtatagtggttagtactc

SEQ ID NO: 57429 - DNA, 30 bp, Homo Sapiens; identical to SEQ ID NO: 12384

SEQ ID NO: 57430 - DNA, 37 bp, Homo Sapiens; identical to SEQ ID NO: 919

SEQ ID NO: 57431 - DNA, 33 bp, Homo Sapiens; identical to SEQ ID NO: 16633

SEQ ID NO: 57432 - DNA, 32 bp, Homo Sapiens; identical to SEQ ID NO: 17006

SEQ ID NO: 57433 - DNA, 46 bp, Homo Sapiens; identical to SEQ ID NO: 14304

SEQ ID NO: 57434 - DNA, 29 bp, Homo Sapiens
ggtccccggttcgaaaccgggcggaaaca

SEQ ID NO: 57435 - DNA, 34 bp, Homo Sapiens; identical to SEQ ID NO: 20146

SEQ ID NO: 57436 - DNA, 33 bp, Homo Sapiens; identical to SEQ ID NO: 25909

SEQ ID NO: 57437 - DNA, 19 bp, Homo Sapiens
gtttatgtagcttacctcc

SEQ ID NO: 57438 - DNA, 30 bp, Homo Sapiens; identical to SEQ ID NO: 5130

SEQ ID NO: 57439 - DNA, 24 bp, Homo Sapiens
tggggattgtgggttcgagtccca

SEQ ID NO: 57440 - DNA, 39 bp, Homo Sapiens; identical to SEQ ID NO: 2259

SEQ ID NO: 57441 - DNA, 31 bp, Homo Sapiens; identical to SEQ ID NO: 18467

SEQ ID NO: 57442 - DNA, 18 bp, Homo Sapiens
cttccaagcagttgaccc

SEQ ID NO: 57443 - DNA, 23 bp, Homo Sapiens
gctagctcagtcggtagagcatg

SEQ ID NO: 57444 - DNA, 37 bp, Homo Sapiens; identical to SEQ ID NO: 6703

SEQ ID NO: 57445 - DNA, 21 bp, Homo Sapiens
agaggtcgatggatcgaaacc

SEQ ID NO: 57446 - DNA, 37 bp, Homo Sapiens; identical to SEQ ID NO: 7459

SEQ ID NO: 57447 - DNA, 32 bp, Homo Sapiens; identical to SEQ ID NO: 18754

SEQ ID NO: 57448 - DNA, 41 bp, Homo Sapiens; identical to SEQ ID NO: 23029

SEQ ID NO: 57449 - DNA, 22 bp, Homo Sapiens
ctcagtggtagagcatttgact

SEQ ID NO: 57450 - DNA, 37 bp, Homo Sapiens; identical to SEQ ID NO: 6717

SEQ ID NO: 57451 - DNA, 33 bp, Homo Sapiens; identical to SEQ ID NO: 17002

SEQ ID NO: 57452 - DNA, 19 bp, Homo Sapiens
agcatgggactcttcatcc

SEQ ID NO: 57453 - DNA, 37 bp, Homo Sapiens; identical to SEQ ID NO: 7569

SEQ ID NO: 57454 - DNA, 25 bp, Homo Sapiens
attcggcgctctcaccgccgcggcc

SEQ ID NO: 57455 - DNA, 17 bp, Homo Sapiens
agggatgggttcgattc

SEQ ID NO: 57456 - DNA, 26 bp, Homo Sapiens
aggcggcccgggttcgactcccggtg

SEQ ID NO: 57457 - DNA, 36 bp, Homo Sapiens; identical to SEQ ID NO: 29983

SEQ ID NO: 57458 - DNA, 37 bp, Homo Sapiens; identical to SEQ ID NO: 6724

SEQ ID NO: 57459 - DNA, 22 bp, Homo Sapiens
ggttcagtggtagaattctcgc

SEQ ID NO: 57460 - DNA, 26 bp, Homo Sapiens
ggagaccggggttcgattccccgacg

SEQ ID NO: 57461 - DNA, 32 bp, Homo Sapiens; identical to SEQ ID NO: 12011

SEQ ID NO: 57462 - DNA, 22 bp, Homo Sapiens
gttcgatcctcacctggagcac

SEQ ID NO: 57463 - DNA, 22 bp, Homo Sapiens
atcgatgcccgcatcctccacc

SEQ ID NO: 57464 - DNA, 24 bp, Homo Sapiens
cggggttcgattccccgacgggga

SEQ ID NO: 57465 - DNA, 28 bp, Homo Sapiens
accttttaagttaaagattaagagaacc

SEQ ID NO: 57466 - DNA, 36 bp, Homo Sapiens; identical to SEQ ID NO: 14082

SEQ ID NO: 57467 - DNA, 32 bp, Homo Sapiens; identical to SEQ ID NO: 15365

SEQ ID NO: 57468 - DNA, 36 bp, Homo Sapiens; identical to SEQ ID NO: 24716

SEQ ID NO: 57469 - DNA, 35 bp, Homo Sapiens; identical to SEQ ID NO: 24722

SEQ ID NO: 57470 - DNA, 19 bp, Homo Sapiens
agtggttatcacgtctgct

SEQ ID NO: 57471 - DNA, 35 bp, Homo Sapiens; identical to SEQ ID NO: 2917

SEQ ID NO: 57472 - DNA, 37 bp, Homo Sapiens; identical to SEQ ID NO: 26881

SEQ ID NO: 57473 - DNA, 35 bp, Homo Sapiens; identical to SEQ ID NO: 16416

SEQ ID NO: 57474 - DNA, 32 bp, Homo Sapiens; identical to SEQ ID NO: 18724

SEQ ID NO: 57475 - DNA, 24 bp, Homo Sapiens
ggttagcactctggactctgaatc

SEQ ID NO: 57476 - DNA, 33 bp, Homo Sapiens; identical to SEQ ID NO: 10094

SEQ ID NO: 57477 - DNA, 35 bp, Homo Sapiens; identical to SEQ ID NO: 26797

SEQ ID NO: 57478 - DNA, 21 bp, Homo Sapiens
gtcggtagagcatgagactct

SEQ ID NO: 57479 - DNA, 25 bp, Homo Sapiens
ggttagcactctggactctgaatcc

SEQ ID NO: 57480 - DNA, 23 bp, Homo Sapiens
tggttcagtggtagaattctcgc

SEQ ID NO: 57481 - DNA, 34 bp, Homo Sapiens; identical to SEQ ID NO: 36723

SEQ ID NO: 57482 - DNA, 36 bp, Homo Sapiens; identical to SEQ ID NO: 6716

SEQ ID NO: 57483 - DNA, 30 bp, Homo Sapiens; identical to SEQ ID NO: 1632

SEQ ID NO: 57484 - DNA, 30 bp, Homo Sapiens; identical to SEQ ID NO: 12456

SEQ ID NO: 57485 - DNA, 43 bp, Homo Sapiens; identical to SEQ ID NO: 36499

SEQ ID NO: 57486 - DNA, 22 bp, Homo Sapiens
ctagcggttaggattcctggtt

SEQ ID NO: 57487 - DNA, 44 bp, Homo Sapiens; identical to SEQ ID NO: 36500

SEQ ID NO: 57488 - DNA, 17 bp, Homo Sapiens
ggccgtgatcgtatagt

SEQ ID NO: 57489 - DNA, 33 bp, Homo Sapiens; identical to SEQ ID NO: 8581

SEQ ID NO: 57490 - DNA, 36 bp, Homo Sapiens; identical to SEQ ID NO: 20597

SEQ ID NO: 57491 - DNA, 39 bp, Homo Sapiens; identical to SEQ ID NO: 28285

SEQ ID NO: 57492 - DNA, 24 bp, Homo Sapiens
gggttcaagtccctgtccaggcgc

SEQ ID NO: 57493 - DNA, 35 bp, Homo Sapiens; identical to SEQ ID NO: 24715

SEQ ID NO: 57494 - DNA, 17 bp, Homo Sapiens
aacgaatgatttcgact

SEQ ID NO: 57495 - DNA, 17 bp, Homo Sapiens
gtggcgcagcggaagcg

SEQ ID NO: 57496 - DNA, 22 bp, Homo Sapiens
agaggtcgatggatcgaaacca

SEQ ID NO: 57497 - DNA, 33 bp, Homo Sapiens; identical to SEQ ID NO: 5168

SEQ ID NO: 57498 - DNA, 35 bp, Homo Sapiens; identical to SEQ ID NO: 17233

SEQ ID NO: 57499 - DNA, 25 bp, Homo Sapiens
acgggttcgaaccccgtccgtgcct

SEQ ID NO: 57500 - DNA, 36 bp, Homo Sapiens; identical to SEQ ID NO: 42451

SEQ ID NO: 57501 - DNA, 27 bp, Homo Sapiens
tatagctcagtggtagagcatttgact

SEQ ID NO: 57502 - DNA, 17 bp, Homo Sapiens
ctctgcgttgtggccgc

SEQ ID NO: 57503 - DNA, 20 bp, Homo Sapiens
tcgaatccgagtcacggcac

SEQ ID NO: 57504 - DNA, 22 bp, Homo Sapiens
tcccacatggtctagcggttag

SEQ ID NO: 57505 - DNA, 29 bp, Homo Sapiens
atatggtctagcggttaggattcctggtt

SEQ ID NO: 57506 - DNA, 36 bp, Homo Sapiens; identical to SEQ ID NO: 6702

SEQ ID NO: 57507 - DNA, 36 bp, Homo Sapiens; identical to SEQ ID NO: 24532

SEQ ID NO: 57508 - DNA, 31 bp, Homo Sapiens; identical to SEQ ID NO: 3852

SEQ ID NO: 57509 - DNA, 40 bp, Homo Sapiens; identical to SEQ ID NO: 19702

SEQ ID NO: 57510 - DNA, 46 bp, Homo Sapiens; identical to SEQ ID NO: 24605

SEQ ID NO: 57511 - DNA, 36 bp, Homo Sapiens; identical to SEQ ID NO: 10916

SEQ ID NO: 57512 - DNA, 35 bp, Homo Sapiens; identical to SEQ ID NO: 26765

SEQ ID NO: 57513 - DNA, 36 bp, Homo Sapiens; identical to SEQ ID NO: 24647

SEQ ID NO: 57514 - DNA, 32 bp, Homo Sapiens; identical to SEQ ID NO: 29841

SEQ ID NO: 57515 - DNA, 18 bp, Homo Sapiens
ggggtatgattctcgctt

SEQ ID NO: 57516 - DNA, 26 bp, Homo Sapiens
gcggaagcgtgctgggcccataaccc

SEQ ID NO: 57517 - DNA, 22 bp, Homo Sapiens
gcagcgatggccgagtggttaa

SEQ ID NO: 57518 - DNA, 16 bp, Homo Sapiens
ggtgcgagaggtcccg

SEQ ID NO: 57519 - DNA, 27 bp, Homo Sapiens
tggttaggattcggcgctctcaccgcc

SEQ ID NO: 57520 - DNA, 26 bp, Homo Sapiens
tggtgtaatggtaagcactctggact

SEQ ID NO: 57521 - DNA, 37 bp, Homo Sapiens; identical to SEQ ID NO: 29436

SEQ ID NO: 57522 - DNA, 36 bp, Homo Sapiens; identical to SEQ ID NO: 24720

SEQ ID NO: 57523 - DNA, 24 bp, Homo Sapiens
aggttcgagtcctgccgcggtcgc

SEQ ID NO: 57524 - DNA, 35 bp, Homo Sapiens; identical to SEQ ID NO: 33804

SEQ ID NO: 57525 - DNA, 21 bp, Homo Sapiens
gcgttcgattcccggtcaggg

SEQ ID NO: 57526 - DNA, 19 bp, Homo Sapiens
gtcggtagagcatgggact

SEQ ID NO: 57527 - DNA, 16 bp, Homo Sapiens
ggccgtgatcgtatag

SEQ ID NO: 57528 - DNA, 42 bp, Homo Sapiens; identical to SEQ ID NO: 9260

SEQ ID NO: 57529 - DNA, 23 bp, Homo Sapiens
cataatctgaaggtcctgagttc

SEQ ID NO: 57530 - DNA, 35 bp, Homo Sapiens; identical to SEQ ID NO: 16532

SEQ ID NO: 57531 - DNA, 30 bp, Homo Sapiens; identical to SEQ ID NO: 17335

SEQ ID NO: 57532 - DNA, 22 bp, Homo Sapiens
tgaaaacctttttccaaggaca

SEQ ID NO: 57533 - DNA, 27 bp, Homo Sapiens
gccgctggtgtagtggtatcatgcaag

SEQ ID NO: 57534 - DNA, 35 bp, Homo Sapiens; identical to SEQ ID NO: 8950

SEQ ID NO: 57535 - DNA, 44 bp, Homo Sapiens; identical to SEQ ID NO: 41748

SEQ ID NO: 57536 - DNA, 33 bp, Homo Sapiens; identical to SEQ ID NO: 15179

SEQ ID NO: 57537 - DNA, 31 bp, Homo Sapiens; identical to SEQ ID NO: 27918

SEQ ID NO: 57538 - DNA, 34 bp, Homo Sapiens; identical to SEQ ID NO: 8949

SEQ ID NO: 57539 - DNA, 35 bp, Homo Sapiens; identical to SEQ ID NO: 14222

SEQ ID NO: 57540 - DNA, 22 bp, Homo Sapiens
gggggattagctcaaatggtag

SEQ ID NO: 57541 - DNA, 19 bp, Homo Sapiens
aaaccgggcggaaacacca

SEQ ID NO: 57542 - DNA, 35 bp, Homo Sapiens; identical to SEQ ID NO: 17217

SEQ ID NO: 57543 - DNA, 22 bp, Homo Sapiens
ggttgtagtccgtgcgagaata

SEQ ID NO: 57544 - DNA, 39 bp, Homo Sapiens; identical to SEQ ID NO: 19701

SEQ ID NO: 57545 - DNA, 21 bp, Homo Sapiens
gaggtggccgagtggttaagg

SEQ ID NO: 57546 - DNA, 16 bp, Homo Sapiens
cccggcccatgcacca

SEQ ID NO: 57547 - DNA, 34 bp, Homo Sapiens; identical to SEQ ID NO: 8555

SEQ ID NO: 57548 - DNA, 37 bp, Homo Sapiens; identical to SEQ ID NO: 12157

SEQ ID NO: 57549 - DNA, 27 bp, Homo Sapiens
aggcggcccgggttcgactcccggtgt

SEQ ID NO: 57550 - DNA, 28 bp, Homo Sapiens
gtttccgtagtgtagtggttatcacgtt

SEQ ID NO: 57551 - DNA, 34 bp, Homo Sapiens; identical to SEQ ID NO: 2354

SEQ ID NO: 57552 - DNA, 37 bp, Homo Sapiens; identical to SEQ ID NO: 29434

SEQ ID NO: 57553 - DNA, 24 bp, Homo Sapiens
atggatcgaaaccatcctctgcta

SEQ ID NO: 57554 - DNA, 29 bp, Homo Sapiens
gttccgggttcgagtcccggcggagtcgc

SEQ ID NO: 57555 - DNA, 18 bp, Homo Sapiens
aggtcgatggatcgaaac

SEQ ID NO: 57556 - DNA, 36 bp, Homo Sapiens; identical to SEQ ID NO: 24650

SEQ ID NO: 57557 - DNA, 22 bp, Homo Sapiens
gcccggatagctcagtcggtag

SEQ ID NO: 57558 - DNA, 21 bp, Homo Sapiens
tcaattccccgacggggagcc

SEQ ID NO: 57559 - DNA, 29 bp, Homo Sapiens
aaaatgttggttatacccttcccgtacta

SEQ ID NO: 57560 - DNA, 34 bp, Homo Sapiens; identical to SEQ ID NO: 35653

SEQ ID NO: 57561 - DNA, 34 bp, Homo Sapiens; identical to SEQ ID NO: 40728

SEQ ID NO: 57562 - DNA, 44 bp, Homo Sapiens; identical to SEQ ID NO: 36502

SEQ ID NO: 57563 - DNA, 34 bp, Homo Sapiens; identical to SEQ ID NO: 24642

SEQ ID NO: 57564 - DNA, 34 bp, Homo Sapiens; identical to SEQ ID NO: 35413

SEQ ID NO: 57565 - DNA, 22 bp, Homo Sapiens
tttccgtagtgtagtggtcatc

SEQ ID NO: 57566 - DNA, 33 bp, Homo Sapiens; identical to SEQ ID NO: 8948

SEQ ID NO: 57567 - DNA, 35 bp, Homo Sapiens; identical to SEQ ID NO: 24649

SEQ ID NO: 57568 - DNA, 22 bp, Homo Sapiens
ttgtagtccgtgcgagaatacc

SEQ ID NO: 57569 - DNA, 31 bp, Homo Sapiens; identical to SEQ ID NO: 2233

SEQ ID NO: 57570 - DNA, 30 bp, Homo Sapiens; identical to SEQ ID NO: 25530

SEQ ID NO: 57571 - DNA, 35 bp, Homo Sapiens; identical to SEQ ID NO: 24531

SEQ ID NO: 57572 - DNA, 36 bp, Homo Sapiens; identical to SEQ ID NO: 26880

SEQ ID NO: 57573 - DNA, 31 bp, Homo Sapiens; identical to SEQ ID NO: 26040

SEQ ID NO: 57574 - DNA, 41 bp, Homo Sapiens; identical to SEQ ID NO: 28601

SEQ ID NO: 57575 - DNA, 40 bp, Homo Sapiens; identical to SEQ ID NO: 20625

SEQ ID NO: 57576 - DNA, 36 bp, Homo Sapiens; identical to SEQ ID NO: 24723

SEQ ID NO: 57577 - DNA, 17 bp, Homo Sapiens
attcggcgctctcaccg

SEQ ID NO: 57578 - DNA, 31 bp, Homo Sapiens; identical to SEQ ID NO: 13229

SEQ ID NO: 57579 - DNA, 36 bp, Homo Sapiens; identical to SEQ ID NO: 26869

SEQ ID NO: 57580 - DNA, 22 bp, Homo Sapiens
ggggtgtagctcagtggtagag

SEQ ID NO: 57581 - DNA, 45 bp, Homo Sapiens; identical to SEQ ID NO: 42950

SEQ ID NO: 57582 - DNA, 19 bp, Homo Sapiens
atgtagctcagtggtagag

SEQ ID NO: 57583 - DNA, 34 bp, Homo Sapiens; identical to SEQ ID NO: 40691

SEQ ID NO: 57584 - DNA, 44 bp, Homo Sapiens; identical to SEQ ID NO: 16226

SEQ ID NO: 57585 - DNA, 33 bp, Homo Sapiens; identical to SEQ ID NO: 10190

SEQ ID NO: 57586 - DNA, 31 bp, Homo Sapiens; identical to SEQ ID NO: 27987

SEQ ID NO: 57587 - DNA, 18 bp, Homo Sapiens
cgaatctcggtgggacct

SEQ ID NO: 57588 - DNA, 20 bp, Homo Sapiens
cgattcccggtcagggaacc

SEQ ID NO: 57589 - DNA, 36 bp, Homo Sapiens; identical to SEQ ID NO: 9937

SEQ ID NO: 57590 - DNA, 27 bp, Homo Sapiens
gagatgaaaacctttttccaaggacac

SEQ ID NO: 57591 - DNA, 28 bp, Homo Sapiens
cccggctagctcagtcggtagagcatgg

SEQ ID NO: 57592 - DNA, 33 bp, Homo Sapiens; identical to SEQ ID NO: 24938

SEQ ID NO: 57593 - DNA, 29 bp, Homo Sapiens
cagagtggcgcagcggaagcgtgctgggc

SEQ ID NO: 57594 - DNA, 34 bp, Homo Sapiens; identical to SEQ ID NO: 8012

SEQ ID NO: 57595 - DNA, 23 bp, Homo Sapiens
atgaaaacctttttccaaggaca

SEQ ID NO: 57596 - DNA, 34 bp, Homo Sapiens; identical to SEQ ID NO: 17232

SEQ ID NO: 57597 - DNA, 36 bp, Homo Sapiens; identical to SEQ ID NO: 918

SEQ ID NO: 57598 - DNA, 34 bp, Homo Sapiens; identical to SEQ ID NO: 8551

SEQ ID NO: 57599 - DNA, 34 bp, Homo Sapiens; identical to SEQ ID NO: 8006

SEQ ID NO: 57600 - DNA, 19 bp, Homo Sapiens
cttaacttgaccgctctga

SEQ ID NO: 57601 - DNA, 16 bp, Homo Sapiens
agctatccattggtct

SEQ ID NO: 57602 - DNA, 45 bp, Homo Sapiens; identical to SEQ ID NO: 3509

SEQ ID NO: 57603 - DNA, 35 bp, Homo Sapiens; identical to SEQ ID NO: 9089

SEQ ID NO: 57604 - DNA, 35 bp, Homo Sapiens; identical to SEQ ID NO: 29703

SEQ ID NO: 57605 - DNA, 36 bp, Homo Sapiens; identical to SEQ ID NO: 42926

SEQ ID NO: 57606 - DNA, 22 bp, Homo Sapiens
tggtagaattctcgcctgccac

SEQ ID NO: 57607 - DNA, 28 bp, Homo Sapiens
agaagcagcttcaaacctgccggggctt

SEQ ID NO: 57608 - DNA, 35 bp, Homo Sapiens; identical to SEQ ID NO: 8007

SEQ ID NO: 57609 - DNA, 23 bp, Homo Sapiens
ggtgtaatggttagcactctgga

SEQ ID NO: 57610 - DNA, 33 bp, Homo Sapiens; identical to SEQ ID NO: 24641

SEQ ID NO: 57611 - DNA, 36 bp, Homo Sapiens; identical to SEQ ID NO: 6723

SEQ ID NO: 57612 - DNA, 17 bp, Homo Sapiens
gtctagtggttaggatt

SEQ ID NO: 57613 - DNA, 17 bp, Homo Sapiens
aggagatcctgggttcg

SEQ ID NO: 57614 - DNA, 35 bp, Homo Sapiens; identical to SEQ ID NO: 10938

SEQ ID NO: 57615 - DNA, 34 bp, Homo Sapiens; identical to SEQ ID NO: 40650

SEQ ID NO: 57616 - DNA, 37 bp, Homo Sapiens; identical to SEQ ID NO: 26686

SEQ ID NO: 57617 - DNA, 27 bp, Homo Sapiens
gggggtatagctcagtggtagagcatt

SEQ ID NO: 57618 - DNA, 18 bp, Homo Sapiens
tcgaaaccatcctctgct

SEQ ID NO: 57619 - DNA, 20 bp, Homo Sapiens
tcgatccccgtacgggccac

SEQ ID NO: 57620 - DNA, 21 bp, Homo Sapiens
cgattcccggccaacgcacca

SEQ ID NO: 57621 - DNA, 31 bp, Homo Sapiens; identical to SEQ ID NO: 2705

SEQ ID NO: 57622 - DNA, 20 bp, Homo Sapiens
gaggtcgatggatcgaaacc

SEQ ID NO: 57623 - DNA, 18 bp, Homo Sapiens
ggatagctcagtcggtag

SEQ ID NO: 57624 - DNA, 29 bp, Homo Sapiens
gaagaagcagcttcaaacctgccggggct

SEQ ID NO: 57625 - DNA, 43 bp, Homo Sapiens; identical to SEQ ID NO: 17864

SEQ ID NO: 57626 - DNA, 36 bp, Homo Sapiens; identical to SEQ ID NO: 17065

SEQ ID NO: 57627 - DNA, 36 bp, Homo Sapiens; identical to SEQ ID NO: 26685

SEQ ID NO: 57628 - DNA, 36 bp, Homo Sapiens; identical to SEQ ID NO: 14075

SEQ ID NO: 57629 - DNA, 34 bp, Homo Sapiens; identical to SEQ ID NO: 37247

SEQ ID NO: 57630 - DNA, 30 bp, Homo Sapiens; identical to SEQ ID NO: 2232

SEQ ID NO: 57631 - DNA, 36 bp, Homo Sapiens; identical to SEQ ID NO: 16643

SEQ ID NO: 57632 - DNA, 18 bp, Homo Sapiens
aggtcgtgagttcgagcc

SEQ ID NO: 57633 - DNA, 40 bp, Homo Sapiens; identical to SEQ ID NO: 10297

SEQ ID NO: 57634 - DNA, 34 bp, Homo Sapiens; identical to SEQ ID NO: 17216

SEQ ID NO: 57635 - DNA, 23 bp, Homo Sapiens
cgtggttgtagtccgtgcgagaa

SEQ ID NO: 57636 - DNA, 17 bp, Homo Sapiens
agtggtagaattctcgc

SEQ ID NO: 57637 - DNA, 19 bp, Homo Sapiens
cgattcccggccaacgcac

SEQ ID NO: 57638 - DNA, 36 bp, Homo Sapiens; identical to SEQ ID NO: 39165

SEQ ID NO: 57639 - DNA, 37 bp, Homo Sapiens; identical to SEQ ID NO: 30923

SEQ ID NO: 57640 - DNA, 21 bp, Homo Sapiens
aacttaacttgaccgctctga

SEQ ID NO: 57641 - DNA, 27 bp, Homo Sapiens
tcattggtcgtggttgtagtccgtgcg

SEQ ID NO: 57642 - DNA, 18 bp, Homo Sapiens
ccgaaaggttggtggttc

SEQ ID NO: 57643 - DNA, 20 bp, Homo Sapiens
tcgagtcctgccgcggtcgc

SEQ ID NO: 57644 - DNA, 23 bp, Homo Sapiens
accaggatggccgagtggttaag

SEQ ID NO: 57645 - DNA, 33 bp, Homo Sapiens; identical to SEQ ID NO: 11630

SEQ ID NO: 57646 - DNA, 34 bp, Homo Sapiens; identical to SEQ ID NO: 8933

SEQ ID NO: 57647 - DNA, 35 bp, Homo Sapiens; identical to SEQ ID NO: 24537

SEQ ID NO: 57648 - DNA, 18 bp, Homo Sapiens
agcatgggactcttaatc

SEQ ID NO: 57649 - DNA, 26 bp, Homo Sapiens
agccgtgatcgtatagtggttagtac

SEQ ID NO: 57650 - DNA, 17 bp, Homo Sapiens
ctcccggtgtgggaacc

SEQ ID NO: 57651 - DNA, 35 bp, Homo Sapiens; identical to SEQ ID NO: 8582

SEQ ID NO: 57652 - DNA, 35 bp, Homo Sapiens; identical to SEQ ID NO: 24646

SEQ ID NO: 57653 - DNA, 17 bp, Homo Sapiens
cgaaaccatcctctgct

SEQ ID NO: 57654 - DNA, 18 bp, Homo Sapiens
aatccgggtgccccctcc

SEQ ID NO: 57655 - DNA, 20 bp, Homo Sapiens
cgaatccgagtcacggcacc

SEQ ID NO: 57656 - DNA, 25 bp, Homo Sapiens
gctcagtcggtagagcatgggactc

SEQ ID NO: 57657 - DNA, 22 bp, Homo Sapiens
ggttcgaatcccaccgctgcca

SEQ ID NO: 57658 - DNA, 18 bp, Homo Sapiens
gattcccggtcagggaac

SEQ ID NO: 57659 - DNA, 45 bp, Homo Sapiens; identical to SEQ ID NO: 35291

SEQ ID NO: 57660 - DNA, 18 bp, Homo Sapiens
ggctcgttggtctagggg

SEQ ID NO: 57661 - DNA, 33 bp, Homo Sapiens; identical to SEQ ID NO: 17231

SEQ ID NO: 57662 - DNA, 16 bp, Homo Sapiens
tgagggtccagggttc

SEQ ID NO: 57663 - DNA, 41 bp, Homo Sapiens; identical to SEQ ID NO: 3454

SEQ ID NO: 57664 - DNA, 37 bp, Homo Sapiens; identical to SEQ ID NO: 14083

SEQ ID NO: 57665 - DNA, 33 bp, Homo Sapiens; identical to SEQ ID NO: 11964

SEQ ID NO: 57666 - DNA, 17 bp, Homo Sapiens
aatccgggtgccccctc

SEQ ID NO: 57667 - DNA, 44 bp, Homo Sapiens; identical to SEQ ID NO: 30152

SEQ ID NO: 57668 - DNA, 34 bp, Homo Sapiens; identical to SEQ ID NO: 14594

SEQ ID NO: 57669 - DNA, 23 bp, Homo Sapiens
gtttccgtagtgtagcggttatc

SEQ ID NO: 57670 - DNA, 28 bp, Homo Sapiens
ttcggcgctctcaccgccgcggcccggg

SEQ ID NO: 57671 - DNA, 20 bp, Homo Sapiens
attccggatcagaagattga

SEQ ID NO: 57672 - DNA, 34 bp, Homo Sapiens; identical to SEQ ID NO: 11965

SEQ ID NO: 57673 - DNA, 18 bp, Homo Sapiens
gatcccgggcggaaacac

SEQ ID NO: 57674 - DNA, 22 bp, Homo Sapiens
tcctcgttagtatagtggtgag

SEQ ID NO: 57675 - DNA, 36 bp, Homo Sapiens; identical to SEQ ID NO: 42665

SEQ ID NO: 57676 - DNA, 25 bp, Homo Sapiens
tggtctaggggtatgattctcgctt

SEQ ID NO: 57677 - DNA, 19 bp, Homo Sapiens
ggggatgtagctcagtggt

SEQ ID NO: 57678 - DNA, 17 bp, Homo Sapiens
ctttttccaaggacacc

SEQ ID NO: 57679 - DNA, 19 bp, Homo Sapiens
tgattctcggtttgggtcc

SEQ ID NO: 57680 - DNA, 20 bp, Homo Sapiens
ggatagctcagtcggtagag

SEQ ID NO: 57681 - DNA, 21 bp, Homo Sapiens
tcgagcctcacctggagcacc

SEQ ID NO: 57682 - DNA, 18 bp, Homo Sapiens
cgaatcccacttctgaca

SEQ ID NO: 57683 - DNA, 34 bp, Homo Sapiens; identical to SEQ ID NO: 4971

SEQ ID NO: 57684 - DNA, 35 bp, Homo Sapiens; identical to SEQ ID NO: 11966

SEQ ID NO: 57685 - DNA, 17 bp, Homo Sapiens
cgcattggacttctaat

SEQ ID NO: 57686 - DNA, 44 bp, Homo Sapiens; identical to SEQ ID NO: 10204

SEQ ID NO: 57687 - DNA, 44 bp, Homo Sapiens; identical to SEQ ID NO: 13630

SEQ ID NO: 57688 - DNA, 35 bp, Homo Sapiens; identical to SEQ ID NO: 20587

SEQ ID NO: 57689 - DNA, 36 bp, Homo Sapiens; identical to SEQ ID NO: 26864

SEQ ID NO: 57690 - DNA, 37 bp, Homo Sapiens; identical to SEQ ID NO: 19699

SEQ ID NO: 57691 - DNA, 27 bp, Homo Sapiens
gtgggtttaagtcccattggtctagcc

SEQ ID NO: 57692 - DNA, 17 bp, Homo Sapiens
gtttatgtagcttacct

SEQ ID NO: 57693 - DNA, 17 bp, Homo Sapiens
taggattcggcgctctc

SEQ ID NO: 57694 - DNA, 36 bp, Homo Sapiens; identical to SEQ ID NO: 6259

SEQ ID NO: 57695 - DNA, 47 bp, Homo Sapiens; identical to SEQ ID NO: 8720

SEQ ID NO: 57696 - DNA, 36 bp, Homo Sapiens; identical to SEQ ID NO: 36662

SEQ ID NO: 57697 - DNA, 16 bp, Homo Sapiens
tcaggatggccgagtg

SEQ ID NO: 57698 - DNA, 30 bp, Homo Sapiens; identical to SEQ ID NO: 5165

SEQ ID NO: 57699 - DNA, 27 bp, Homo Sapiens
tccgggttcgagtcccggcggagtcgc

SEQ ID NO: 57700 - DNA, 21 bp, Homo Sapiens
cggatagctcagtcggtagag

SEQ ID NO: 57701 - DNA, 16 bp, Homo Sapiens
aatccggctcgaagga

SEQ ID NO: 57702 - DNA, 19 bp, Homo Sapiens
ggtagaattctcgcctgcc

SEQ ID NO: 57703 - DNA, 34 bp, Homo Sapiens; identical to SEQ ID NO: 35054

SEQ ID NO: 57704 - DNA, 21 bp, Homo Sapiens
tagtggttatcacgttcgcct

SEQ ID NO: 57705 - DNA, 16 bp, Homo Sapiens
aaatgtttagacgggc

SEQ ID NO: 57706 - DNA, 32 bp, Homo Sapiens; identical to SEQ ID NO: 5167

SEQ ID NO: 57707 - DNA, 33 bp, Homo Sapiens; identical to SEQ ID NO: 5217

SEQ ID NO: 57708 - DNA, 33 bp, Homo Sapiens; identical to SEQ ID NO: 24951

SEQ ID NO: 57709 - DNA, 17 bp, Homo Sapiens
cggttaggattcctggt

SEQ ID NO: 57710 - DNA, 17 bp, Homo Sapiens
gcactctggactttgaa

SEQ ID NO: 57711 - DNA, 22 bp, Homo Sapiens
accaggatggccgagtggttaa

SEQ ID NO: 57712 - DNA, 20 bp, Homo Sapiens
caagtcacgtcggggtcacc

SEQ ID NO: 57713 - DNA, 19 bp, Homo Sapiens
ttgggtgcgagaggtcccg

SEQ ID NO: 57714 - DNA, 27 bp, Homo Sapiens
atggtctagcggttaggattcctggtt

SEQ ID NO: 57715 - DNA, 47 bp, Homo Sapiens; identical to SEQ ID NO: 15057

SEQ ID NO: 57716 - DNA, 34 bp, Homo Sapiens; identical to SEQ ID NO: 18568

SEQ ID NO: 57717 - DNA, 35 bp, Homo Sapiens; identical to SEQ ID NO: 2800

SEQ ID NO: 57718 - DNA, 34 bp, Homo Sapiens; identical to SEQ ID NO: 8833

SEQ ID NO: 57719 - DNA, 33 bp, Homo Sapiens; identical to SEQ ID NO: 39346

SEQ ID NO: 57720 - DNA, 36 bp, Homo Sapiens; identical to SEQ ID NO: 42915

SEQ ID NO: 57721 - DNA, 26 bp, Homo Sapiens
gagaaagctcacaagaactgctaact

SEQ ID NO: 57722 - DNA, 19 bp, Homo Sapiens
cggatagctcagtcggtag

SEQ ID NO: 57723 - DNA, 18 bp, Homo Sapiens
caagttctggtctccgga

SEQ ID NO: 57724 - DNA, 25 bp, Homo Sapiens
tggtgtagtggtatcatgcaagatt

SEQ ID NO: 57725 - DNA, 18 bp, Homo Sapiens
gttcaaatctcgctgggg

SEQ ID NO: 57726 - DNA, 24 bp, Homo Sapiens
agttcgagcctcacctggagcacc

SEQ ID NO: 57727 - DNA, 35 bp, Homo Sapiens; identical to SEQ ID NO: 24643

SEQ ID NO: 57728 - DNA, 16 bp, Homo Sapiens
ccggagatgaaaacct

SEQ ID NO: 57729 - DNA, 18 bp, Homo Sapiens
aattctcgctggggcctc

SEQ ID NO: 57730 - DNA, 18 bp, Homo Sapiens
agtggcgcagcggaagcg

SEQ ID NO: 57731 - DNA, 20 bp, Homo Sapiens
caagtccctgtccaggcgcc

SEQ ID NO: 57732 - DNA, 34 bp, Homo Sapiens; identical to SEQ ID NO: 8544

SEQ ID NO: 57733 - DNA, 26 bp, Homo Sapiens
gatttcaacttaacttgaccgctctg

SEQ ID NO: 57734 - DNA, 19 bp, Homo Sapiens
ggcgcggtggccaagtggt

SEQ ID NO: 57735 - DNA, 20 bp, Homo Sapiens
aaatcccggacgagccccca

SEQ ID NO: 57736 - DNA, 21 bp, Homo Sapiens
gtagtggtatcatgcaagatt

SEQ ID NO: 57737 - DNA, 29 bp, Homo Sapiens
tcgatggatcgaaaccatcctctgctacc

SEQ ID NO: 57738 - DNA, 19 bp, Homo Sapiens
agcatgggactcttaatcc

SEQ ID NO: 57739 - DNA, 20 bp, Homo Sapiens
cgcgaaaggtccccggttcg

SEQ ID NO: 57740 - DNA, 42 bp, Homo Sapiens; identical to SEQ ID NO: 30795

SEQ ID NO: 57741 - DNA, 22 bp, Homo Sapiens
ttcaaatctcggtgggacctcc

SEQ ID NO: 57742 - DNA, 34 bp, Homo Sapiens; identical to SEQ ID NO: 8589

SEQ ID NO: 57743 - DNA, 33 bp, Homo Sapiens; identical to SEQ ID NO: 38314

SEQ ID NO: 57744 - DNA, 47 bp, Homo Sapiens; identical to SEQ ID NO: 24606

SEQ ID NO: 57745 - DNA, 22 bp, Homo Sapiens
ttcgaatcccagtagagcctcc

SEQ ID NO: 57746 - DNA, 17 bp, Homo Sapiens
ttcaaatcccggacgag

SEQ ID NO: 57747 - DNA, 32 bp, Homo Sapiens; identical to SEQ ID NO: 9765

SEQ ID NO: 57748 - DNA, 17 bp, Homo Sapiens
gggtatgattctcgctt

SEQ ID NO: 57749 - DNA, 24 bp, Homo Sapiens
gtcaggatggccgagtggtctaag

SEQ ID NO: 57750 - DNA, 24 bp, Homo Sapiens
agcagagtggcgcagcggaagcgt

SEQ ID NO: 57751 - DNA, 17 bp, Homo Sapiens
gggtgtgataggtggca

SEQ ID NO: 57752 - DNA, 41 bp, Homo Sapiens; identical to SEQ ID NO: 5913

SEQ ID NO: 57753 - DNA, 21 bp, Homo Sapiens
ttcgaatcccagcggggcctc

SEQ ID NO: 57754 - DNA, 17 bp, Homo Sapiens
aattccccgacggggag

SEQ ID NO: 57755 - DNA, 35 bp, Homo Sapiens; identical to SEQ ID NO: 40729

SEQ ID NO: 57756 - DNA, 16 bp, Homo Sapiens
gttcgactcccggtgt

SEQ ID NO: 57757 - DNA, 22 bp, Homo Sapiens
gtctagtggttaggattcggcg

SEQ ID NO: 57758 - DNA, 19 bp, Homo Sapiens
gctttcaccgccgcggccc

SEQ ID NO: 57759 - DNA, 19 bp, Homo Sapiens
tctgaaggtcctgagttcg

SEQ ID NO: 57760 - DNA, 17 bp, Homo Sapiens
gggtagagcatttgact

SEQ ID NO: 57761 - DNA, 18 bp, Homo Sapiens
gggttcgactcccggtgt

SEQ ID NO: 57762 - DNA, 19 bp, Homo Sapiens
cgaatcccttcgtggttgc

SEQ ID NO: 57763 - DNA, 34 bp, Homo Sapiens; identical to SEQ ID NO: 14221

SEQ ID NO: 57764 - DNA, 32 bp, Homo Sapiens; identical to SEQ ID NO: 17062

SEQ ID NO: 57765 - DNA, 25 bp, Homo Sapiens
ggctgtgatggccgagtggttaagg

SEQ ID NO: 57766 - DNA, 22 bp, Homo Sapiens
gtttccgtagtgtagtggttat

SEQ ID NO: 57767 - DNA, 25 bp, Homo Sapiens
tcccacatggtctagcggttaggat

SEQ ID NO: 57768 - DNA, 17 bp, Homo Sapiens
atccgggtgccccctcc

SEQ ID NO: 57769 - DNA, 21 bp, Homo Sapiens
ttcgattccccgacggggagc

SEQ ID NO: 57770 - DNA, 36 bp, Homo Sapiens; identical to SEQ ID NO: 22610

SEQ ID NO: 57771 - DNA, 17 bp, Homo Sapiens
tggtagagcatttgact

SEQ ID NO: 57772 - DNA, 25 bp, Homo Sapiens
ggtgagcactctggactctgaatcc

SEQ ID NO: 57773 - DNA, 24 bp, Homo Sapiens
ggtctaggggtatgattctcgctt

SEQ ID NO: 57774 - DNA, 22 bp, Homo Sapiens
ggttcgaaaccgggcggaaaca

SEQ ID NO: 57775 - DNA, 23 bp, Homo Sapiens
ggttcgaatcccagcggtgcctc

SEQ ID NO: 57776 - DNA, 38 bp, Homo Sapiens; identical to SEQ ID NO: 3099

SEQ ID NO: 57777 - DNA, 26 bp, Homo Sapiens
aagcagcttcaaacctgccggggctt

SEQ ID NO: 57778 - DNA, 21 bp, Homo Sapiens
tcgtaaaccgaagatcgcggg

SEQ ID NO: 57779 - DNA, 22 bp, Homo Sapiens
gttcgattcccggccaacgcac

SEQ ID NO: 57780 - DNA, 25 bp, Homo Sapiens
gggttcgaatcccttcgtggttgcc

SEQ ID NO: 57781 - DNA, 38 bp, Homo Sapiens; identical to SEQ ID NO: 16291

SEQ ID NO: 57782 - DNA, 20 bp, Homo Sapiens
tcgaatcccagcggggcctc

SEQ ID NO: 57783 - DNA, 29 bp, Homo Sapiens
atcctgggttcgaatcccagcggtgcctc

SEQ ID NO: 57784 - DNA, 17 bp, Homo Sapiens
attctcggtttgggtcc

SEQ ID NO: 57785 - DNA, 42 bp, Homo Sapiens; identical to SEQ ID NO: 7620

SEQ ID NO: 57786 - DNA, 33 bp, Homo Sapiens; identical to SEQ ID NO: 8573

SEQ ID NO: 57787 - DNA, 23 bp, Homo Sapiens
gtatgattctcggtttgggtccg

SEQ ID NO: 57788 - DNA, 16 bp, Homo Sapiens
tcccggccactgcacc

SEQ ID NO: 57789 - DNA, 35 bp, Homo Sapiens; identical to SEQ ID NO: 25745

SEQ ID NO: 57790 - DNA, 21 bp, Homo Sapiens
tctggtctccggatggaggcg

SEQ ID NO: 57791 - DNA, 42 bp, Homo Sapiens; identical to SEQ ID NO: 43037

SEQ ID NO: 57792 - DNA, 29 bp, Homo Sapiens
gtcgtggttgtagtccgtgcgagaatacc

SEQ ID NO: 57793 - DNA, 18 bp, Homo Sapiens
gtcggtagagcatgggac

SEQ ID NO: 57794 - DNA, 16 bp, Homo Sapiens
tagaattctcgcctgc

SEQ ID NO: 57795 - DNA, 16 bp, Homo Sapiens
ccgggcagaagcacca

SEQ ID NO: 57796 - DNA, 26 bp, Homo Sapiens
ctggtgtagtggtatcatgcaagatt

SEQ ID NO: 57797 - DNA, 20 bp, Homo Sapiens
tcgaatcctgccgactacgc

SEQ ID NO: 57798 - DNA, 29 bp, Homo Sapiens
aagaagcagcttcaaacctgccggggctt

SEQ ID NO: 57799 - DNA, 42 bp, Homo Sapiens; identical to SEQ ID NO: 9435

SEQ ID NO: 57800 - DNA, 37 bp, Homo Sapiens; identical to SEQ ID NO: 24648

SEQ ID NO: 57801 - DNA, 27 bp, Homo Sapiens
agctcagtcggtagagcatgggactct

SEQ ID NO: 57802 - DNA, 19 bp, Homo Sapiens
cgaatcccagcggggcctc

SEQ ID NO: 57803 - DNA, 33 bp, Homo Sapiens; identical to SEQ ID NO: 1355

SEQ ID NO: 57804 - DNA, 35 bp, Homo Sapiens; identical to SEQ ID NO: 5027

SEQ ID NO: 57805 - DNA, 45 bp, Homo Sapiens; identical to SEQ ID NO: 7361

SEQ ID NO: 57806 - DNA, 34 bp, Homo Sapiens; identical to SEQ ID NO: 33907

SEQ ID NO: 57807 - DNA, 17 bp, Homo Sapiens
cgaaaccgggcggaaac

SEQ ID NO: 57808 - DNA, 34 bp, Homo Sapiens; identical to SEQ ID NO: 20393

SEQ ID NO: 57809 - DNA, 21 bp, Homo Sapiens
gttcgagcctcagagagggca

SEQ ID NO: 57810 - DNA, 33 bp, Homo Sapiens; identical to SEQ ID NO: 24136

SEQ ID NO: 57811 - DNA, 33 bp, Homo Sapiens; identical to SEQ ID NO: 24144

SEQ ID NO: 57812 - DNA, 43 bp, Homo Sapiens; identical to SEQ ID NO: 25543

SEQ ID NO: 57813 - DNA, 34 bp, Homo Sapiens; identical to SEQ ID NO: 29342

SEQ ID NO: 57814 - DNA, 36 bp, Homo Sapiens; identical to SEQ ID NO: 42660

SEQ ID NO: 57815 - DNA, 23 bp, Homo Sapiens
tccctggtggtctagtggttagg

SEQ ID NO: 57816 - DNA, 30 bp, Homo Sapiens; identical to SEQ ID NO: 19439

SEQ ID NO: 57817 - DNA, 25 bp, Homo Sapiens
tggttgtagtccgtgcgagaatacc

SEQ ID NO: 57818 - DNA, 36 bp, Homo Sapiens; identical to SEQ ID NO: 25536

SEQ ID NO: 57819 - DNA, 21 bp, Homo Sapiens
tctagtggttaggattcggcg

SEQ ID NO: 57820 - DNA, 24 bp, Homo Sapiens
gggttcgagtcccttcgtggtcgc

SEQ ID NO: 57821 - DNA, 39 bp, Homo Sapiens; identical to SEQ ID NO: 3100

SEQ ID NO: 57822 - DNA, 18 bp, Homo Sapiens
cgatcccgggtttcggca

SEQ ID NO: 57823 - DNA, 16 bp, Homo Sapiens
ggtagagcatgagact

SEQ ID NO: 57824 - DNA, 31 bp, Homo Sapiens; identical to SEQ ID NO: 17229

SEQ ID NO: 57825 - DNA, 31 bp, Homo Sapiens; identical to SEQ ID NO: 33842

SEQ ID NO: 57826 - DNA, 18 bp, Homo Sapiens
gtatgattctcgctttgg

SEQ ID NO: 57827 - DNA, 16 bp, Homo Sapiens
gttaggattcctggtt

SEQ ID NO: 57828 - DNA, 20 bp, Homo Sapiens
caaatccgggtgccccctcc

SEQ ID NO: 57829 - DNA, 36 bp, Homo Sapiens; identical to SEQ ID NO: 29431

SEQ ID NO: 57830 - DNA, 20 bp, Homo Sapiens
ttaggcctctttttaccacc

SEQ ID NO: 57831 - DNA, 19 bp, Homo Sapiens
cgaatccgagtcacggcac

SEQ ID NO: 57832 - DNA, 21 bp, Homo Sapiens
gggggtgtagctcagtggtag

SEQ ID NO: 57833 - DNA, 30 bp, Homo Sapiens; identical to SEQ ID NO: 3185

SEQ ID NO: 57834 - DNA, 21 bp, Homo Sapiens
aggtcgatggatcgaaaccat

SEQ ID NO: 57835 - DNA, 35 bp, Homo Sapiens; identical to SEQ ID NO: 7816

SEQ ID NO: 57836 - DNA, 41 bp, Homo Sapiens; identical to SEQ ID NO: 35134

SEQ ID NO: 57837 - DNA, 20 bp, Homo Sapiens
cgatccccgtacgggccacc

SEQ ID NO: 57838 - DNA, 39 bp, Homo Sapiens; identical to SEQ ID NO: 36385

SEQ ID NO: 57839 - DNA, 37 bp, Homo Sapiens; identical to SEQ ID NO: 36634

SEQ ID NO: 57840 - DNA, 37 bp, Homo Sapiens; identical to SEQ ID NO: 14763

SEQ ID NO: 57841 - DNA, 33 bp, Homo Sapiens; identical to SEQ ID NO: 36994

SEQ ID NO: 57842 - DNA, 33 bp, Homo Sapiens; identical to SEQ ID NO: 37605

SEQ ID NO: 57843 - DNA, 42 bp, Homo Sapiens; identical to SEQ ID NO: 41507

SEQ ID NO: 57844 - DNA, 40 bp, Homo Sapiens; identical to SEQ ID NO: 26752

SEQ ID NO: 57845 - DNA, 38 bp, Homo Sapiens; identical to SEQ ID NO: 27496

SEQ ID NO: 57846 - DNA, 43 bp, Homo Sapiens; identical to SEQ ID NO: 30025

SEQ ID NO: 57847 - DNA, 46 bp, Homo Sapiens; identical to SEQ ID NO: 42954

SEQ ID NO: 57848 - DNA, 21 bp, Homo Sapiens
tggtctagcggttaggattcc

SEQ ID NO: 57849 - DNA, 22 bp, Homo Sapiens
gggatgtagctcagtggtagag

SEQ ID NO: 57850 - DNA, 22 bp, Homo Sapiens
ttcgaaaccgggcggaaacacc

SEQ ID NO: 57851 - DNA, 25 bp, Homo Sapiens
gggttcgagtcccttcgtggtcgcc

SEQ ID NO: 57852 - DNA, 16 bp, Homo Sapiens
agctcagtcggtagag

SEQ ID NO: 57853 - DNA, 24 bp, Homo Sapiens
atggccgagcggtctaaggcgctg

SEQ ID NO: 57854 - DNA, 28 bp, Homo Sapiens
cgatggatcgaaaccatcctctgctacc

SEQ ID NO: 57855 - DNA, 37 bp, Homo Sapiens; identical to SEQ ID NO: 11015

SEQ ID NO: 57856 - DNA, 17 bp, Homo Sapiens
tggttatcacgtctgct

SEQ ID NO: 57857 - DNA, 20 bp, Homo Sapiens
cgaatccggctcggaggacc

SEQ ID NO: 57858 - DNA, 24 bp, Homo Sapiens
ggttcgaatcccacttctgacacc

SEQ ID NO: 57859 - DNA, 19 bp, Homo Sapiens
cagagtggcgcagcggaag

SEQ ID NO: 57860 - DNA, 23 bp, Homo Sapiens
gttcaaatcccggacgagccccc

SEQ ID NO: 57861 - DNA, 22 bp, Homo Sapiens
ttcgagtcctgccgcggtcgcc

SEQ ID NO: 57862 - DNA, 31 bp, Homo Sapiens; identical to SEQ ID NO: 7478

SEQ ID NO: 57863 - DNA, 21 bp, Homo Sapiens
ttcgattcccgggcggcgcac

SEQ ID NO: 57864 - DNA, 25 bp, Homo Sapiens
tggttcgaatccggctcgaaggacc

SEQ ID NO: 57865 - DNA, 25 bp, Homo Sapiens
aaggataacagctatccattggtct

SEQ ID NO: 57866 - DNA, 20 bp, Homo Sapiens
cgagcctcacctggagcacc

SEQ ID NO: 57867 - DNA, 31 bp, Homo Sapiens; identical to SEQ ID NO: 1353

SEQ ID NO: 57868 - DNA, 32 bp, Homo Sapiens; identical to SEQ ID NO: 1663

SEQ ID NO: 57869 - DNA, 33 bp, Homo Sapiens; identical to SEQ ID NO: 1674

SEQ ID NO: 57870 - DNA, 32 bp, Homo Sapiens; identical to SEQ ID NO: 5171

SEQ ID NO: 57871 - DNA, 37 bp, Homo Sapiens; identical to SEQ ID NO: 6335

SEQ ID NO: 57872 - DNA, 16 bp, Homo Sapiens
atccccgtacgggcca

SEQ ID NO: 57873 - DNA, 34 bp, Homo Sapiens; identical to SEQ ID NO: 6891

SEQ ID NO: 57874 - DNA, 37 bp, Homo Sapiens; identical to SEQ ID NO: 8107

SEQ ID NO: 57875 - DNA, 39 bp, Homo Sapiens; identical to SEQ ID NO: 33918

SEQ ID NO: 57876 - DNA, 35 bp, Homo Sapiens; identical to SEQ ID NO: 11540

SEQ ID NO: 57877 - DNA, 19 bp, Homo Sapiens
cgaatcctgttcgtgacgc

SEQ ID NO: 57878 - DNA, 25 bp, Homo Sapiens
cgggttcaatccccggcatctccac

SEQ ID NO: 57879 - DNA, 40 bp, Homo Sapiens; identical to SEQ ID NO: 36335

SEQ ID NO: 57880 - DNA, 18 bp, Homo Sapiens
cttaagatccaatggatt

SEQ ID NO: 57881 - DNA, 18 bp, Homo Sapiens
gaaaccgggcagaagcac

SEQ ID NO: 57882 - DNA, 32 bp, Homo Sapiens; identical to SEQ ID NO: 15533

SEQ ID NO: 57883 - DNA, 29 bp, Homo Sapiens
gatccgagttcaaatctcggtgggacctc

SEQ ID NO: 57884 - DNA, 35 bp, Homo Sapiens; identical to SEQ ID NO: 20596

SEQ ID NO: 57885 - DNA, 29 bp, Homo Sapiens
tcagaagattgagggttcgaatcccttcg

SEQ ID NO: 57886 - DNA, 20 bp, Homo Sapiens
tcgaatcctgttcgtgacgc

SEQ ID NO: 57887 - DNA, 16 bp, Homo Sapiens
tctaaggcgctgcgtt

SEQ ID NO: 57888 - DNA, 36 bp, Homo Sapiens; identical to SEQ ID NO: 26872

SEQ ID NO: 57889 - DNA, 44 bp, Homo Sapiens; identical to SEQ ID NO: 29744

SEQ ID NO: 57890 - DNA, 29 bp, Homo Sapiens
ttgagggttcgaatcccttcgtggttgcc

SEQ ID NO: 57891 - DNA, 24 bp, Homo Sapiens
ggttcgattccccgacggggagcc

SEQ ID NO: 57892 - DNA, 26 bp, Homo Sapiens
gggttcgattcccggtcagggaacca

SEQ ID NO: 57893 - DNA, 26 bp, Homo Sapiens
gttcagtggtagaattctcgcctgcc

SEQ ID NO: 57894 - DNA, 23 bp, Homo Sapiens
tcgtggttgtagtccgtgcgaga

SEQ ID NO: 57895 - DNA, 25 bp, Homo Sapiens
ctggtggtctagtggttaggattcg

SEQ ID NO: 57896 - DNA, 16 bp, Homo Sapiens
ccttcgatagctcagc

SEQ ID NO: 57897 - DNA, 27 bp, Homo Sapiens
tagctcagtcggtagagcatgggactc

SEQ ID NO: 57898 - DNA, 24 bp, Homo Sapiens
cgtggttgtagtccgtgcgagaat

SEQ ID NO: 57899 - DNA, 22 bp, Homo Sapiens
ttcaaatcccggacgagccccc

SEQ ID NO: 57900 - DNA, 19 bp, Homo Sapiens
aatccgagtcacggcacca

SEQ ID NO: 57901 - DNA, 19 bp, Homo Sapiens
tcgaatccgagtcacggca

SEQ ID NO: 57902 - DNA, 23 bp, Homo Sapiens
aggttcgactcctggctggctcg

SEQ ID NO: 57903 - DNA, 22 bp, Homo Sapiens
ttcgaatcccacttctgacacc

SEQ ID NO: 57904 - DNA, 18 bp, Homo Sapiens
agccccagtggaaccacc

SEQ ID NO: 57905 - DNA, 20 bp, Homo Sapiens
acttaagatccaatggacat

SEQ ID NO: 57906 - DNA, 21 bp, Homo Sapiens
gttcgattcccggccaacgca

SEQ ID NO: 57907 - DNA, 23 bp, Homo Sapiens
ggttcgagtcccttcgtggtcgc

SEQ ID NO: 57908 - DNA, 37 bp, Homo Sapiens; identical to SEQ ID NO: 14011

SEQ ID NO: 57909 - DNA, 29 bp, Homo Sapiens
gattccaggttcgactcctggctggctcg

SEQ ID NO: 57910 - DNA, 36 bp, Homo Sapiens; identical to SEQ ID NO: 2162

SEQ ID NO: 57911 - DNA, 19 bp, Homo Sapiens
cttcaaacctgccggggct

SEQ ID NO: 57912 - DNA, 20 bp, Homo Sapiens
gtagaattctcgcctgccac

SEQ ID NO: 57913 - DNA, 20 bp, Homo Sapiens
gttcaagtccctgttcgggc

SEQ ID NO: 57914 - DNA, 30 bp, Homo Sapiens; identical to SEQ ID NO: 24572

SEQ ID NO: 57915 - DNA, 24 bp, Homo Sapiens
gggttcgaatcccttcgtggttgc

SEQ ID NO: 57916 - DNA, 23 bp, Homo Sapiens
cggttcgaatccgagtcacggca

SEQ ID NO: 57917 - DNA, 31 bp, Homo Sapiens; identical to SEQ ID NO: 16192

SEQ ID NO: 57918 - DNA, 20 bp, Homo Sapiens
gttcgagcctcacacggggc

SEQ ID NO: 57919 - DNA, 21 bp, Homo Sapiens
tcgagtcccatctgggtcgcc

SEQ ID NO: 57920 - DNA, 21 bp, Homo Sapiens
tggtctaggggtatgattctc

SEQ ID NO: 57921 - DNA, 20 bp, Homo Sapiens
caaatctcggtgggacctcc

SEQ ID NO: 57922 - DNA, 19 bp, Homo Sapiens
agtccctgttcgggcgcca

SEQ ID NO: 57923 - DNA, 25 bp, Homo Sapiens
agggattgtgggttcgagtcccatc

SEQ ID NO: 57924 - DNA, 32 bp, Homo Sapiens; identical to SEQ ID NO: 12011

SEQ ID NO: 57925 - DNA, 34 bp, Homo Sapiens; identical to SEQ ID NO: 12013

SEQ ID NO: 57926 - DNA, 33 bp, Homo Sapiens; identical to SEQ ID NO: 12012

SEQ ID NO: 57927 - DNA, 34 bp, Homo Sapiens; identical to SEQ ID NO: 13078

SEQ ID NO: 57928 - DNA, 35 bp, Homo Sapiens; identical to SEQ ID NO: 12014

SEQ ID NO: 57929 - DNA, 32 bp, Homo Sapiens; identical to SEQ ID NO: 16341

SEQ ID NO: 57930 - DNA, 33 bp, Homo Sapiens; identical to SEQ ID NO: 11999

SEQ ID NO: 57931 - DNA, 33 bp, Homo Sapiens; identical to SEQ ID NO: 22474

SEQ ID NO: 57932 - DNA, 31 bp, Homo Sapiens; identical to SEQ ID NO: 16340

SEQ ID NO: 57933 - DNA, 19 bp, Homo Sapiens
cgcattggtggttcagtgg

SEQ ID NO: 57934 - DNA, 18 bp, Homo Sapiens
cccccatgtctaacaaca

SEQ ID NO: 57935 - DNA, 20 bp, Homo Sapiens
agactcaagttctggtctcc

SEQ ID NO: 57936 - DNA, 22 bp, Homo Sapiens
gcggttatcacgtctgctttac

SEQ ID NO: 57937 - DNA, 30 bp, Homo Sapiens; identical to SEQ ID NO: 20531

SEQ ID NO: 57938 - DNA, 48 bp, Homo Sapiens; identical to SEQ ID NO: 19948

SEQ ID NO: 57939 - DNA, 33 bp, Homo Sapiens; identical to SEQ ID NO: 29187

SEQ ID NO: 57940 - DNA, 48 bp, Homo Sapiens; identical to SEQ ID NO: 30128

SEQ ID NO: 57941 - DNA, 31 bp, Homo Sapiens; identical to SEQ ID NO: 16631

SEQ ID NO: 57942 - DNA, 48 bp, Homo Sapiens; identical to SEQ ID NO: 1967

SEQ ID NO: 57943 - DNA, 32 bp, Homo Sapiens; identical to SEQ ID NO: 22473

SEQ ID NO: 57944 - DNA, 34 bp, Homo Sapiens; identical to SEQ ID NO: 13076

SEQ ID NO: 57945 - DNA, 21 bp, Homo Sapiens
cgtagtcgtggccgagtggtt

SEQ ID NO: 57946 - DNA, 42 bp, Homo Sapiens; identical to SEQ ID NO: 19943

SEQ ID NO: 57947 - DNA, 21 bp, Homo Sapiens
aacaacatggctttctcacca

SEQ ID NO: 57948 - DNA, 48 bp, Homo Sapiens; identical to SEQ ID NO: 11342

SEQ ID NO: 57949 - DNA, 31 bp, Homo Sapiens; identical to SEQ ID NO: 12010

SEQ ID NO: 57950 - DNA, 48 bp, Homo Sapiens; identical to SEQ ID NO: 23640

SEQ ID NO: 57951 - DNA, 48 bp, Homo Sapiens; identical to SEQ ID NO: 6485

SEQ ID NO: 57952 - DNA, 48 bp, Homo Sapiens; identical to SEQ ID NO: 22200

SEQ ID NO: 57953 - DNA, 30 bp, Homo Sapiens; identical to SEQ ID NO: 746

SEQ ID NO: 57954 - DNA, 31 bp, Homo Sapiens; identical to SEQ ID NO: 16402

SEQ ID NO: 57955 - DNA, 48 bp, Homo Sapiens; identical to SEQ ID NO: 16576

SEQ ID NO: 57956 - DNA, 36 bp, Homo Sapiens; identical to SEQ ID NO: 8927

SEQ ID NO: 57957 - DNA, 21 bp, Homo Sapiens
cagtcggtggagcatgggact

SEQ ID NO: 57958 - DNA, 16 bp, Homo Sapiens
ggtatgattctcgctt

SEQ ID NO: 57959 - DNA, 48 bp, Homo Sapiens; identical to SEQ ID NO: 54722

SEQ ID NO: 57960 - DNA, 33 bp, Homo Sapiens; identical to SEQ ID NO: 22561

SEQ ID NO: 57961 - DNA, 33 bp, Homo Sapiens; identical to SEQ ID NO: 18529

SEQ ID NO: 57962 - DNA, 34 bp, Homo Sapiens; identical to SEQ ID NO: 4416

SEQ ID NO: 57963 - DNA, 48 bp, Homo Sapiens; identical to SEQ ID NO: 7748

SEQ ID NO: 57964 - DNA, 20 bp, Homo Sapiens
accagaatggccgagtggtt

SEQ ID NO: 57965 - DNA, 24 bp, Homo Sapiens
ccatatggtctagcggttaggatt

SEQ ID NO: 57966 - DNA, 33 bp, Homo Sapiens; identical to SEQ ID NO: 3335

SEQ ID NO: 57967 - DNA, 48 bp, Homo Sapiens; identical to SEQ ID NO: 17348

SEQ ID NO: 57968 - DNA, 48 bp, Homo Sapiens; identical to SEQ ID NO: 29125

SEQ ID NO: 57969 - DNA, 42 bp, Homo Sapiens; identical to SEQ ID NO: 16649

SEQ ID NO: 57970 - DNA, 39 bp, Homo Sapiens; identical to SEQ ID NO: 20159

SEQ ID NO: 57971 - DNA, 21 bp, Homo Sapiens
gggtggttcagtggtagaatt

SEQ ID NO: 57972 - DNA, 21 bp, Homo Sapiens
ggggatgtagctcagtggtag

SEQ ID NO: 57973 - DNA, 48 bp, Homo Sapiens; identical to SEQ ID NO: 3662

SEQ ID NO: 57974 - DNA, 26 bp, Homo Sapiens
gtagtggttatcacgttcgcctcaca

SEQ ID NO: 57975 - DNA, 32 bp, Homo Sapiens; identical to SEQ ID NO: 22553

SEQ ID NO: 57976 - DNA, 27 bp, Homo Sapiens
gcggcccgggttcgactcccggtgtgg

SEQ ID NO: 57977 - DNA, 48 bp, Homo Sapiens; identical to SEQ ID NO: 7509

SEQ ID NO: 57978 - DNA, 48 bp, Homo Sapiens; identical to SEQ ID NO: 3634

SEQ ID NO: 57979 - DNA, 29 bp, Homo Sapiens
tcgtatagtggttagtactctgcgttgtg

SEQ ID NO: 57980 - DNA, 28 bp, Homo Sapiens
agtcggtagagcatgagacccttaatct

SEQ ID NO: 57981 - DNA, 48 bp, Homo Sapiens; identical to SEQ ID NO: 1961

SEQ ID NO: 57982 - DNA, 33 bp, Homo Sapiens; identical to SEQ ID NO: 13075

SEQ ID NO: 57983 - DNA, 17 bp, Homo Sapiens
tagctcaggcggtagag

SEQ ID NO: 57984 - DNA, 27 bp, Homo Sapiens
gtgtagtggttatcacgtctgctttac

SEQ ID NO: 57985 - DNA, 41 bp, Homo Sapiens; identical to SEQ ID NO: 9223

SEQ ID NO: 57986 - DNA, 48 bp, Homo Sapiens; identical to SEQ ID NO: 29231

SEQ ID NO: 57987 - DNA, 48 bp, Homo Sapiens; identical to SEQ ID NO: 15008

SEQ ID NO: 57988 - DNA, 35 bp, Homo Sapiens; identical to SEQ ID NO: 12001

SEQ ID NO: 57989 - DNA, 48 bp, Homo Sapiens; identical to SEQ ID NO: 6628

SEQ ID NO: 57990 - DNA, 23 bp, Homo Sapiens
gctcagtcggtagagcatgggac

SEQ ID NO: 57991 - DNA, 48 bp, Homo Sapiens; identical to SEQ ID NO: 12321

SEQ ID NO: 57992 - DNA, 23 bp, Homo Sapiens
tagagcatgggactcttaatctc

SEQ ID NO: 57993 - DNA, 48 bp, Homo Sapiens; identical to SEQ ID NO: 978

SEQ ID NO: 57994 - DNA, 48 bp, Homo Sapiens; identical to SEQ ID NO: 29587

SEQ ID NO: 57995 - DNA, 22 bp, Homo Sapiens
gggggattagctcaaatggtag

SEQ ID NO: 57996 - DNA, 48 bp, Homo Sapiens; identical to SEQ ID NO: 7156

SEQ ID NO: 57997 - DNA, 22 bp, Homo Sapiens
gtggttatcacgttcgcctcac

SEQ ID NO: 57998 - DNA, 17 bp, Homo Sapiens
cgtagtcgtggccgagt

SEQ ID NO: 57999 - DNA, 48 bp, Homo Sapiens; identical to SEQ ID NO: 28392

SEQ ID NO: 58000 - DNA, 48 bp, Homo Sapiens; identical to SEQ ID NO: 12371

SEQ ID NO: 58001 - DNA, 48 bp, Homo Sapiens; identical to SEQ ID NO: 25250

SEQ ID NO: 58002 - DNA, 22 bp, Homo Sapiens
ggttcgactcctggctggctcg

SEQ ID NO: 58003 - DNA, 48 bp, Homo Sapiens; identical to SEQ ID NO: 24785

SEQ ID NO: 58004 - DNA, 18 bp, Homo Sapiens
cgaaaaagtcatggaggc

SEQ ID NO: 58005 - DNA, 34 bp, Homo Sapiens; identical to SEQ ID NO: 12000

SEQ ID NO: 58006 - DNA, 29 bp, Homo Sapiens
gtgatcgtatagtggttagtactctgcgt

SEQ ID NO: 58007 - DNA, 17 bp, Homo Sapiens
agttctggtctccggat

SEQ ID NO: 58008 - DNA, 18 bp, Homo Sapiens
gtcccatctgggtcgcca

SEQ ID NO: 58009 - DNA, 25 bp, Homo Sapiens
agtcggtagagcatgagacccttaa

SEQ ID NO: 58010 - DNA, 26 bp, Homo Sapiens
tggtctagtggttaggattcggcgct

SEQ ID NO: 58011 - DNA, 48 bp, Homo Sapiens; identical to SEQ ID NO: 15503

SEQ ID NO: 58012 - DNA, 48 bp, Homo Sapiens; identical to SEQ ID NO: 7292

SEQ ID NO: 58013 - DNA, 29 bp, Homo Sapiens
cgccgtgatcgtatagtggttagtactct

SEQ ID NO: 58014 - DNA, 19 bp, Homo Sapiens
gtctaacaacatggctttc

SEQ ID NO: 58015 - DNA, 48 bp, Homo Sapiens; identical to SEQ ID NO: 21736

SEQ ID NO: 58016 - DNA, 24 bp, Homo Sapiens
ctcgttagtatagtggtgagtatc

SEQ ID NO: 58017 - DNA, 48 bp, Homo Sapiens; identical to SEQ ID NO: 30101

SEQ ID NO: 58018 - DNA, 16 bp, Homo Sapiens
ccggggttcgattccc

SEQ ID NO: 58019 - DNA, 36 bp, Homo Sapiens; identical to SEQ ID NO: 11967

SEQ ID NO: 58020 - DNA, 40 bp, Homo Sapiens; identical to SEQ ID NO: 25616

SEQ ID NO: 58021 - DNA, 29 bp, Homo Sapiens
ccgtagtggagtggttatcacgttcgcct

SEQ ID NO: 58022 - DNA, 41 bp, Homo Sapiens; identical to SEQ ID NO: 16648

SEQ ID NO: 58023 - DNA, 16 bp, Homo Sapiens
ttcctcttcttaacac

SEQ ID NO: 58024 - DNA, 24 bp, Homo Sapiens
ggtctaggggtatgattctcgctt

SEQ ID NO: 58025 - DNA, 45 bp, Homo Sapiens; identical to SEQ ID NO: 15432

SEQ ID NO: 58026 - DNA, 40 bp, Homo Sapiens; identical to SEQ ID NO: 11417

SEQ ID NO: 58027 - DNA, 29 bp, Homo Sapiens
ttggtggttcagtggtagaattctcgcct

SEQ ID NO: 58028 - DNA, 28 bp, Homo Sapiens
gttagcactctggactctgaatccagcg

SEQ ID NO: 58029 - DNA, 31 bp, Homo Sapiens; identical to SEQ ID NO: 747

SEQ ID NO: 58030 - DNA, 48 bp, Homo Sapiens; identical to SEQ ID NO: 16967

SEQ ID NO: 58031 - DNA, 18 bp, Homo Sapiens
cgatgcccgcatcctcca

SEQ ID NO: 58032 - DNA, 29 bp, Homo Sapiens
acagaggcttacgaccccttatttacccc

SEQ ID NO: 58033 - DNA, 27 bp, Homo Sapiens
gtcggtagagcatgagacccttaatct

SEQ ID NO: 58034 - DNA, 24 bp, Homo Sapiens
tcggtagagcatgagacccttaat

SEQ ID NO: 58035 - DNA, 48 bp, Homo Sapiens; identical to SEQ ID NO: 13921

SEQ ID NO: 58036 - DNA, 27 bp, Homo Sapiens
gctggtgtagtggtatcatgcaagatt

SEQ ID NO: 58037 - DNA, 18 bp, Homo Sapiens
gcaatggtggttcagtgg

SEQ ID NO: 58038 - DNA, 43 bp, Homo Sapiens; identical to SEQ ID NO: 30472

SEQ ID NO: 58039 - DNA, 37 bp, Homo Sapiens; identical to SEQ ID NO: 16346

SEQ ID NO: 58040 - DNA, 32 bp, Homo Sapiens; identical to SEQ ID NO: 1917

SEQ ID NO: 58041 - DNA, 29 bp, Homo Sapiens
ttagtatagtggtgagtatccccgcctgt

SEQ ID NO: 58042 - DNA, 36 bp, Homo Sapiens; identical to SEQ ID NO: 8433

SEQ ID NO: 58043 - DNA, 48 bp, Homo Sapiens; identical to SEQ ID NO: 17689

SEQ ID NO: 58044 - DNA, 47 bp, Homo Sapiens; identical to SEQ ID NO: 17155

SEQ ID NO: 58045 - DNA, 30 bp, Homo Sapiens; identical to SEQ ID NO: 6089

SEQ ID NO: 58046 - DNA, 23 bp, Homo Sapiens
tctgaaggtcgtgagttcgagcc

SEQ ID NO: 58047 - DNA, 17 bp, Homo Sapiens
gttcgatccccgtacgg

SEQ ID NO: 58048 - DNA, 19 bp, Homo Sapiens
cacgttcgcctcacacgcg

SEQ ID NO: 58049 - DNA, 48 bp, Homo Sapiens; identical to SEQ ID NO: 16655

SEQ ID NO: 58050 - DNA, 23 bp, Homo Sapiens
ccggatagctcagtcggtagagc

SEQ ID NO: 58051 - DNA, 17 bp, Homo Sapiens
agcagagtggcgcagcg

SEQ ID NO: 58052 - DNA, 29 bp, Homo Sapiens
ttggtggtgcagtggtagaattctcgcct

SEQ ID NO: 58053 - DNA, 48 bp, Homo Sapiens; identical to SEQ ID NO: 4219

SEQ ID NO: 58054 - DNA, 22 bp, Homo Sapiens
ctcagtcggtagagcatgagac

SEQ ID NO: 58055 - DNA, 48 bp, Homo Sapiens; identical to SEQ ID NO: 16444

SEQ ID NO: 58056 - DNA, 48 bp, Homo Sapiens; identical to SEQ ID NO: 2026

SEQ ID NO: 58057 - DNA, 19 bp, Homo Sapiens
agtgggtagagcatcagac

SEQ ID NO: 58058 - DNA, 48 bp, Homo Sapiens; identical to SEQ ID NO: 23967

SEQ ID NO: 58059 - DNA, 48 bp, Homo Sapiens; identical to SEQ ID NO: 4619

SEQ ID NO: 58060 - DNA, 35 bp, Homo Sapiens; identical to SEQ ID NO: 24953

SEQ ID NO: 58061 - DNA, 27 bp, Homo Sapiens
cagtcggtagagcatgagacccttaat

SEQ ID NO: 58062 - DNA, 25 bp, Homo Sapiens
ggttcgaatcccactcctgacacca

SEQ ID NO: 58063 - DNA, 23 bp, Homo Sapiens
ctcagtcggtagagcatgagacc

SEQ ID NO: 58064 - DNA, 48 bp, Homo Sapiens; identical to SEQ ID NO: 23772

SEQ ID NO: 58065 - DNA, 36 bp, Homo Sapiens; identical to SEQ ID NO: 20889

SEQ ID NO: 58066 - DNA, 48 bp, Homo Sapiens; identical to SEQ ID NO: 3036

SEQ ID NO: 58067 - DNA, 29 bp, Homo Sapiens
tagctcagtcggtagagcatcagactttt

SEQ ID NO: 58068 - DNA, 23 bp, Homo Sapiens
gtagagcatgagacccttaatct

SEQ ID NO: 58069 - DNA, 48 bp, Homo Sapiens; identical to SEQ ID NO: 3091

SEQ ID NO: 58070 - DNA, 23 bp, Homo Sapiens
gtgagtatccccgcctgtcacgc

SEQ ID NO: 58071 - DNA, 33 bp, Homo Sapiens; identical to SEQ ID NO: 14911

SEQ ID NO: 58072 - DNA, 25 bp, Homo Sapiens
tcataatctgaaggtcgtgagttcg

SEQ ID NO: 58073 - DNA, 42 bp, Homo Sapiens; identical to SEQ ID NO: 30984

SEQ ID NO: 58074 - DNA, 16 bp, Homo Sapiens
tcaaatcccggacgag

SEQ ID NO: 58075 - DNA, 30 bp, Homo Sapiens; identical to SEQ ID NO: 23456

SEQ ID NO: 58076 - DNA, 36 bp, Homo Sapiens; identical to SEQ ID NO: 24964

SEQ ID NO: 58077 - DNA, 19 bp, Homo Sapiens
cctggtggtctagtggcta

SEQ ID NO: 58078 - DNA, 48 bp, Homo Sapiens; identical to SEQ ID NO: 8259

SEQ ID NO: 58079 - DNA, 16 bp, Homo Sapiens
accgagcggaaacacc

SEQ ID NO: 58080 - DNA, 26 bp, Homo Sapiens
ttggtctaggggtatgattctcgctt

SEQ ID NO: 58081 - DNA, 48 bp, Homo Sapiens; identical to SEQ ID NO: 1889

SEQ ID NO: 58082 - DNA, 35 bp, Homo Sapiens; identical to SEQ ID NO: 14359

SEQ ID NO: 58083 - DNA, 31 bp, Homo Sapiens; identical to SEQ ID NO: 30884

SEQ ID NO: 58084 - DNA, 33 bp, Homo Sapiens; identical to SEQ ID NO: 15078

SEQ ID NO: 58085 - DNA, 46 bp, Homo Sapiens; identical to SEQ ID NO: 543

SEQ ID NO: 58086 - DNA, 48 bp, Homo Sapiens; identical to SEQ ID NO: 23915

SEQ ID NO: 58087 - DNA, 48 bp, Homo Sapiens; identical to SEQ ID NO: 7916

SEQ ID NO: 58088 - DNA, 20 bp, Homo Sapiens
ggggatgtagctcagtggta

SEQ ID NO: 58089 - DNA, 48 bp, Homo Sapiens; identical to SEQ ID NO: 3720

SEQ ID NO: 58090 - DNA, 32 bp, Homo Sapiens; identical to SEQ ID NO: 11353

SEQ ID NO: 58091 - DNA, 48 bp, Homo Sapiens; identical to SEQ ID NO: 6004

SEQ ID NO: 58092 - DNA, 29 bp, Homo Sapiens
cataatctgaaggtcgtgagttcgagcct

SEQ ID NO: 58093 - DNA, 20 bp, Homo Sapiens
gtggttagtactctgcgttg

SEQ ID NO: 58094 - DNA, 32 bp, Homo Sapiens; identical to SEQ ID NO: 11412

SEQ ID NO: 58095 - DNA, 24 bp, Homo Sapiens
gcccggatagctcagtcggtagag

SEQ ID NO: 58096 - DNA, 30 bp, Homo Sapiens; identical to SEQ ID NO: 10129

SEQ ID NO: 58097 - DNA, 38 bp, Homo Sapiens; identical to SEQ ID NO: 14505

SEQ ID NO: 58098 - DNA, 40 bp, Homo Sapiens; identical to SEQ ID NO: 19720

SEQ ID NO: 58099 - DNA, 22 bp, Homo Sapiens
ttcgactcctggctggctcgcc

SEQ ID NO: 58100 - DNA, 32 bp, Homo Sapiens; identical to SEQ ID NO: 25111

SEQ ID NO: 58101 - DNA, 22 bp, Homo Sapiens
gaggtcgatggatcgaaaccat

SEQ ID NO: 58102 - DNA, 48 bp, Homo Sapiens; identical to SEQ ID NO: 5318

SEQ ID NO: 58103 - DNA, 29 bp, Homo Sapiens
ggctagctcagtcggtagagcatgggact

SEQ ID NO: 58104 - DNA, 32 bp, Homo Sapiens; identical to SEQ ID NO: 12411

SEQ ID NO: 58105 - DNA, 32 bp, Homo Sapiens; identical to SEQ ID NO: 17588

SEQ ID NO: 58106 - DNA, 48 bp, Homo Sapiens; identical to SEQ ID NO: 9894

SEQ ID NO: 58107 - DNA, 32 bp, Homo Sapiens; identical to SEQ ID NO: 132

SEQ ID NO: 58108 - DNA, 33 bp, Homo Sapiens; identical to SEQ ID NO: 27100

SEQ ID NO: 58109 - DNA, 21 bp, Homo Sapiens
atggttagcactctggactct

SEQ ID NO: 58110 - DNA, 22 bp, Homo Sapiens
ggttcaattccccgacggggag

SEQ ID NO: 58111 - DNA, 30 bp, Homo Sapiens; identical to SEQ ID NO: 7329

SEQ ID NO: 58112 - DNA, 30 bp, Homo Sapiens; identical to SEQ ID NO: 27367

SEQ ID NO: 58113 - DNA, 28 bp, Homo Sapiens
cgtagtgtagtggttatcacgttcgcct

SEQ ID NO: 58114 - DNA, 22 bp, Homo Sapiens
tatccattggtcttaggcccca

SEQ ID NO: 58115 - DNA, 17 bp, Homo Sapiens
cgtcaggatggccgagc

SEQ ID NO: 58116 - DNA, 17 bp, Homo Sapiens
gcggcccgggttcgatt

SEQ ID NO: 58117 - DNA, 30 bp, Homo Sapiens; identical to SEQ ID NO: 22490

SEQ ID NO: 58118 - DNA, 30 bp, Homo Sapiens; identical to SEQ ID NO: 7557

SEQ ID NO: 58119 - DNA, 20 bp, Homo Sapiens
ggttatcacattcgcctcac

SEQ ID NO: 58120 - DNA, 18 bp, Homo Sapiens
cgagtcccggcggagtcg

SEQ ID NO: 58121 - DNA, 35 bp, Homo Sapiens; identical to SEQ ID NO: 20410

SEQ ID NO: 58122 - DNA, 25 bp, Homo Sapiens
agtttaaattagaatcttagctttg

SEQ ID NO: 58123 - DNA, 48 bp, Homo Sapiens; identical to SEQ ID NO: 22979

SEQ ID NO: 58124 - DNA, 48 bp, Homo Sapiens; identical to SEQ ID NO: 7997

SEQ ID NO: 58125 - DNA, 24 bp, Homo Sapiens
gctcagtcggtagagcatgagact

SEQ ID NO: 58126 - DNA, 17 bp, Homo Sapiens
tggtctagtggttagga

SEQ ID NO: 58127 - DNA, 16 bp, Homo Sapiens
tggttcgagcccaccc

SEQ ID NO: 58128 - DNA, 30 bp, Homo Sapiens; identical to SEQ ID NO: 16394

SEQ ID NO: 58129 - DNA, 20 bp, Homo Sapiens
gtggttatcacgttcgcctc

SEQ ID NO: 58130 - DNA, 20 bp, Homo Sapiens
gtcagaggttcaattcctct

SEQ ID NO: 58131 - DNA, 20 bp, Homo Sapiens
gtggttatcacgttcgccta

SEQ ID NO: 58132 - DNA, 27 bp, Homo Sapiens
gcattggtggttcaatggtagaattct

SEQ ID NO: 58133 - DNA, 48 bp, Homo Sapiens; identical to SEQ ID NO: 10367

SEQ ID NO: 58134 - DNA, 48 bp, Homo Sapiens; identical to SEQ ID NO: 545

SEQ ID NO: 58135 - DNA, 31 bp, Homo Sapiens; identical to SEQ ID NO: 24360

SEQ ID NO: 58136 - DNA, 23 bp, Homo Sapiens
tggaggcgtgggttcgaatccca

SEQ ID NO: 58137 - DNA, 17 bp, Homo Sapiens
ggggatgtagctcagtg

SEQ ID NO: 58138 - DNA, 48 bp, Homo Sapiens; identical to SEQ ID NO: 23238

SEQ ID NO: 58139 - DNA, 26 bp, Homo Sapiens
ggttccatagtgtagtggttatcacg

SEQ ID NO: 58140 - DNA, 41 bp, Homo Sapiens; identical to SEQ ID NO: 23001

SEQ ID NO: 58141 - DNA, 18 bp, Homo Sapiens
aaccgggcagaaacacca

SEQ ID NO: 58142 - DNA, 21 bp, Homo Sapiens
gacttaagatccaatggacat

SEQ ID NO: 58143 - DNA, 24 bp, Homo Sapiens
tccaggttcgactcctggctggct

SEQ ID NO: 58144 - DNA, 48 bp, Homo Sapiens; identical to SEQ ID NO: 9513

SEQ ID NO: 58145 - DNA, 48 bp, Homo Sapiens; identical to SEQ ID NO: 11026

SEQ ID NO: 58146 - DNA, 40 bp, Homo Sapiens; identical to SEQ ID NO: 25305

SEQ ID NO: 58147 - DNA, 48 bp, Homo Sapiens; identical to SEQ ID NO: 26362

SEQ ID NO: 58148 - DNA, 16 bp, Homo Sapiens
gtggtatagtggtgag

SEQ ID NO: 58149 - DNA, 20 bp, Homo Sapiens
gctttgcacgtatgaggccc

SEQ ID NO: 58150 - DNA, 22 bp, Homo Sapiens
ccctcagtaagttgcaatactt

SEQ ID NO: 58151 - DNA, 27 bp, Homo Sapiens
tacactgaaaatgtttagacgggctca

SEQ ID NO: 58152 - DNA, 29 bp, Homo Sapiens
ctccctggtggtctagtggttaggattcg

SEQ ID NO: 58153 - DNA, 37 bp, Homo Sapiens; identical to SEQ ID NO: 6724

SEQ ID NO: 58154 - DNA, 25 bp, Homo Sapiens
gtgtagtggttatcacgttcgcctc

SEQ ID NO: 58155 - DNA, 21 bp, Homo Sapiens
cgatgcccgcatcctccacca

SEQ ID NO: 58156 - DNA, 29 bp, Homo Sapiens
tggaggcgtgggttcgaatcccacttctg

SEQ ID NO: 58157 - DNA, 48 bp, Homo Sapiens; identical to SEQ ID NO: 2836

SEQ ID NO: 58158 - DNA, 21 bp, Homo Sapiens
ggttccatagtgtagtggtta

SEQ ID NO: 58159 - DNA, 30 bp, Homo Sapiens; identical to SEQ ID NO: 2590

SEQ ID NO: 58160 - DNA, 28 bp, Homo Sapiens
gctagctcagtcggtagagcatgggact

SEQ ID NO: 58161 - DNA, 31 bp, Homo Sapiens; identical to SEQ ID NO: 628

SEQ ID NO: 58162 - DNA, 26 bp, Homo Sapiens
gtgtagtggttatcacgttcgcctca

SEQ ID NO: 58163 - DNA, 39 bp, Homo Sapiens; identical to SEQ ID NO: 18109

SEQ ID NO: 58164 - DNA, 30 bp, Homo Sapiens; identical to SEQ ID NO: 12504

SEQ ID NO: 58165 - DNA, 17 bp, Homo Sapiens
ggttagcgcgttcggct

SEQ ID NO: 58166 - DNA, 23 bp, Homo Sapiens
gttcgattcccgggcggcgcacc

SEQ ID NO: 58167 - DNA, 38 bp, Homo Sapiens; identical to SEQ ID NO: 30362

SEQ ID NO: 58168 - DNA, 19 bp, Homo Sapiens
cccattcttgcgacccggg

SEQ ID NO: 58169 - DNA, 30 bp, Homo Sapiens; identical to SEQ ID NO: 5130

SEQ ID NO: 58170 - DNA, 31 bp, Homo Sapiens; identical to SEQ ID NO: 8886

SEQ ID NO: 58171 - DNA, 29 bp, Homo Sapiens
ggattcctggttttcacccaggcggcccg

SEQ ID NO: 58172 - DNA, 22 bp, Homo Sapiens
gtggttatcacatctgctttac

SEQ ID NO: 58173 - DNA, 25 bp, Homo Sapiens
gctcagtcggtagagcatgagaccc

SEQ ID NO: 58174 - DNA, 48 bp, Homo Sapiens; identical to SEQ ID NO: 8201

SEQ ID NO: 58175 - DNA, 48 bp, Homo Sapiens; identical to SEQ ID NO: 30477

SEQ ID NO: 58176 - DNA, 34 bp, Homo Sapiens; identical to SEQ ID NO: 12822

SEQ ID NO: 58177 - DNA, 18 bp, Homo Sapiens
cccaacttacacttagga

SEQ ID NO: 58178 - DNA, 16 bp, Homo Sapiens
tccaggtgccccctcc

SEQ ID NO: 58179 - DNA, 34 bp, Homo Sapiens; identical to SEQ ID NO: 28804

SEQ ID NO: 58180 - DNA, 48 bp, Homo Sapiens; identical to SEQ ID NO: 16352

SEQ ID NO: 58181 - DNA, 31 bp, Homo Sapiens; identical to SEQ ID NO: 17920

SEQ ID NO: 58182 - DNA, 27 bp, Homo Sapiens
ggggcgtgggttcgaatcccaccgctg

SEQ ID NO: 58183 - DNA, 20 bp, Homo Sapiens
tgtagtggtcatcacgttcg

SEQ ID NO: 58184 - DNA, 28 bp, Homo Sapiens
gagatttcaacttaacttgaccgctctg

SEQ ID NO: 58185 - DNA, 18 bp, Homo Sapiens
ctttgatagagtaaataa

SEQ ID NO: 58186 - DNA, 48 bp, Homo Sapiens; identical to SEQ ID NO: 13764

SEQ ID NO: 58187 - DNA, 28 bp, Homo Sapiens
atcgtatagtggttagtactctgcgttg

SEQ ID NO: 58188 - DNA, 47 bp, Homo Sapiens; identical to SEQ ID NO: 29124

SEQ ID NO: 58189 - DNA, 24 bp, Homo Sapiens
ccggatagctcagtcggtagagca

SEQ ID NO: 58190 - DNA, 32 bp, Homo Sapiens; identical to SEQ ID NO: 21510

SEQ ID NO: 58191 - DNA, 40 bp, Homo Sapiens; identical to SEQ ID NO: 19702

SEQ ID NO: 58192 - DNA, 19 bp, Homo Sapiens
gggatgtagctcagtggta

SEQ ID NO: 58193 - DNA, 16 bp, Homo Sapiens
gttatcacatctgctt

SEQ ID NO: 58194 - DNA, 43 bp, Homo Sapiens; identical to SEQ ID NO: 16650

SEQ ID NO: 58195 - DNA, 46 bp, Homo Sapiens; identical to SEQ ID NO: 2803

SEQ ID NO: 58196 - DNA, 25 bp, Homo Sapiens
agtgtagtggttatcacgttcgcct

SEQ ID NO: 58197 - DNA, 20 bp, Homo Sapiens
taggggtatgattctcgctt

SEQ ID NO: 58198 - DNA, 19 bp, Homo Sapiens
gactttgaatccagcgatc

SEQ ID NO: 58199 - DNA, 32 bp, Homo Sapiens; identical to SEQ ID NO: 7775

SEQ ID NO: 58200 - DNA, 40 bp, Homo Sapiens; identical to SEQ ID NO: 10736

SEQ ID NO: 58201 - DNA, 30 bp, Homo Sapiens; identical to SEQ ID NO: 25643

SEQ ID NO: 58202 - DNA, 31 bp, Homo Sapiens; identical to SEQ ID NO: 15076

SEQ ID NO: 58203 - DNA, 48 bp, Homo Sapiens; identical to SEQ ID NO: 24993

SEQ ID NO: 58204 - DNA, 25 bp, Homo Sapiens
caatacactgaaaatgtttagacgg

SEQ ID NO: 58205 - DNA, 48 bp, Homo Sapiens; identical to SEQ ID NO: 12102

SEQ ID NO: 58206 - DNA, 29 bp, Homo Sapiens
cagcggaagcgtgctgggcccataaccca

SEQ ID NO: 58207 - DNA, 48 bp, Homo Sapiens; identical to SEQ ID NO: 6415

SEQ ID NO: 58208 - DNA, 17 bp, Homo Sapiens
gccccgggttcgatccc

SEQ ID NO: 58209 - DNA, 35 bp, Homo Sapiens; identical to SEQ ID NO: 25187

SEQ ID NO: 58210 - DNA, 19 bp, Homo Sapiens
gggtggttcagtggtagaa

SEQ ID NO: 58211 - DNA, 32 bp, Homo Sapiens; identical to SEQ ID NO: 31106

SEQ ID NO: 58212 - DNA, 48 bp, Homo Sapiens; identical to SEQ ID NO: 16071

SEQ ID NO: 58213 - DNA, 25 bp, Homo Sapiens
gtttccgtagtgtagtggttatcac

SEQ ID NO: 58214 - DNA, 37 bp, Homo Sapiens; identical to SEQ ID NO: 1427

SEQ ID NO: 58215 - DNA, 30 bp, Homo Sapiens; identical to SEQ ID NO: 8321

SEQ ID NO: 58216 - DNA, 25 bp, Homo Sapiens
ggaagcgtgctgggcccataaccca

SEQ ID NO: 58217 - DNA, 31 bp, Homo Sapiens; identical to SEQ ID NO: 26321

SEQ ID NO: 58218 - DNA, 17 bp, Homo Sapiens
aatggtaagcactctgg

SEQ ID NO: 58219 - DNA, 21 bp, Homo Sapiens
gctaaatcctatatatcttac

SEQ ID NO: 58220 - DNA, 31 bp, Homo Sapiens; identical to SEQ ID NO: 21139

SEQ ID NO: 58221 - DNA, 21 bp, Homo Sapiens
tctagcggttaggattcctgg

SEQ ID NO: 58222 - DNA, 47 bp, Homo Sapiens; identical to SEQ ID NO: 816

SEQ ID NO: 58223 - DNA, 17 bp, Homo Sapiens
tctcatagtcctagcca

SEQ ID NO: 58224 - DNA, 18 bp, Homo Sapiens
aatggtagaattctcgcc

SEQ ID NO: 58225 - DNA, 32 bp, Homo Sapiens; identical to SEQ ID NO: 11544

SEQ ID NO: 58226 - DNA, 26 bp, Homo Sapiens
ctaatggtggagttaaagactttttc

SEQ ID NO: 58227 - DNA, 48 bp, Homo Sapiens; identical to SEQ ID NO: 15058

SEQ ID NO: 58228 - DNA, 23 bp, Homo Sapiens
gtagtggttatcacgtctgcttt

SEQ ID NO: 58229 - DNA, 18 bp, Homo Sapiens
tcggtagagcatgagacc

SEQ ID NO: 58230 - DNA, 26 bp, Homo Sapiens
tcacacgcgaaaggtccccggttcga

SEQ ID NO: 58231 - DNA, 23 bp, Homo Sapiens
gtgtagtggttatcacgttcgcc

SEQ ID NO: 58232 - DNA, 37 bp, Homo Sapiens; identical to SEQ ID NO: 14327

SEQ ID NO: 58233 - DNA, 35 bp, Homo Sapiens; identical to SEQ ID NO: 25357

SEQ ID NO: 58234 - DNA, 16 bp, Homo Sapiens
gttcgagcctcacctg

SEQ ID NO: 58235 - DNA, 48 bp, Homo Sapiens; identical to SEQ ID NO: 24607

SEQ ID NO: 58236 - DNA, 19 bp, Homo Sapiens
ggccgcgtggcctaatgga

SEQ ID NO: 58237 - DNA, 16 bp, Homo Sapiens
ggtcccatggtgtaat

SEQ ID NO: 58238 - DNA, 48 bp, Homo Sapiens; identical to SEQ ID NO: 59

SEQ ID NO: 58239 - DNA, 28 bp, Homo Sapiens
ttggcctcctaagccagggattgtgggt

SEQ ID NO: 58240 - DNA, 27 bp, Homo Sapiens
aggcatcagcctccggagctggggatt

SEQ ID NO: 58241 - DNA, 48 bp, Homo Sapiens; identical to SEQ ID NO: 26979

SEQ ID NO: 58242 - DNA, 32 bp, Homo Sapiens; identical to SEQ ID NO: 14659

SEQ ID NO: 58243 - DNA, 37 bp, Homo Sapiens; identical to SEQ ID NO: 10990

SEQ ID NO: 58244 - DNA, 33 bp, Homo Sapiens; identical to SEQ ID NO: 19576

SEQ ID NO: 58245 - DNA, 29 bp, Homo Sapiens
agaaagctcacaagaactgctaactcatg

SEQ ID NO: 58246 - DNA, 39 bp, Homo Sapiens; identical to SEQ ID NO: 22579

SEQ ID NO: 58247 - DNA, 27 bp, Homo Sapiens
tcgtatagtggttagtactctgcgttg

SEQ ID NO: 58248 - DNA, 16 bp, Homo Sapiens
gttatacccttcccgt

SEQ ID NO: 58249 - DNA, 42 bp, Homo Sapiens; identical to SEQ ID NO: 23928

SEQ ID NO: 58250 - DNA, 48 bp, Homo Sapiens; identical to SEQ ID NO: 22238

SEQ ID NO: 58251 - DNA, 20 bp, Homo Sapiens
gggggattagctcaaatggt

SEQ ID NO: 58252 - DNA, 37 bp, Homo Sapiens; identical to SEQ ID NO: 2770

SEQ ID NO: 58253 - DNA, 48 bp, Homo Sapiens; identical to SEQ ID NO: 1020

SEQ ID NO: 58254 - DNA, 17 bp, Homo Sapiens
gttttgcagtccttacc

SEQ ID NO: 58255 - DNA, 40 bp, Homo Sapiens; identical to SEQ ID NO: 2342

SEQ ID NO: 58256 - DNA, 19 bp, Homo Sapiens
taggattcggcgctttcac

SEQ ID NO: 58257 - DNA, 29 bp, Homo Sapiens
ttggtctaggggtatgattctcgctttgg

SEQ ID NO: 58258 - DNA, 18 bp, Homo Sapiens
aaccgagcggaaacacca

SEQ ID NO: 58259 - DNA, 32 bp, Homo Sapiens; identical to SEQ ID NO: 26542

SEQ ID NO: 58260 - DNA, 17 bp, Homo Sapiens
aatagtaccgttaactt

SEQ ID NO: 58261 - DNA, 29 bp, Homo Sapiens
gtcggtagagcatgggactcttaatccca

SEQ ID NO: 58262 - DNA, 17 bp, Homo Sapiens
aaccgggcagaaacacc

SEQ ID NO: 58263 - DNA, 22 bp, Homo Sapiens
tagtggttagtactctgcgttg

SEQ ID NO: 58264 - DNA, 42 bp, Homo Sapiens; identical to SEQ ID NO: 25488

SEQ ID NO: 58265 - DNA, 17 bp, Homo Sapiens
aaccgagcggaaacacc

SEQ ID NO: 58266 - DNA, 33 bp, Homo Sapiens; identical to SEQ ID NO: 23457

SEQ ID NO: 58267 - DNA, 16 bp, Homo Sapiens
atagctcagtggtaga

SEQ ID NO: 58268 - DNA, 46 bp, Homo Sapiens; identical to SEQ ID NO: 13307

SEQ ID NO: 58269 - DNA, 48 bp, Homo Sapiens; identical to SEQ ID NO: 222

SEQ ID NO: 58270 - DNA, 48 bp, Homo Sapiens; identical to SEQ ID NO: 998

SEQ ID NO: 58271 - DNA, 23 bp, Homo Sapiens
ggggatgtagctcagtggtagag

SEQ ID NO: 58272 - DNA, 18 bp, Homo Sapiens
ggttagtactctgcgttg

SEQ ID NO: 58273 - DNA, 24 bp, Homo Sapiens
tatagtggttagtactctgcgttg

SEQ ID NO: 58274 - DNA, 21 bp, Homo Sapiens
aaccggagatgaaaacctttt

SEQ ID NO: 58275 - DNA, 33 bp, Homo Sapiens; identical to SEQ ID NO: 449

SEQ ID NO: 58276 - DNA, 48 bp, Homo Sapiens; identical to SEQ ID NO: 3325

SEQ ID NO: 58277 - DNA, 23 bp, Homo Sapiens
ttagtactctgcgttgtggccgc

SEQ ID NO: 58278 - DNA, 33 bp, Homo Sapiens; identical to SEQ ID NO: 17570

SEQ ID NO: 58279 - DNA, 23 bp, Homo Sapiens
cagtcggtagagcatgggactct

SEQ ID NO: 58280 - DNA, 28 bp, Homo Sapiens
tatagtttaaccaaaacatcagattgtg

SEQ ID NO: 58281 - DNA, 27 bp, Homo Sapiens
gggagaccggggttcgattccccgacg

SEQ ID NO: 58282 - DNA, 21 bp, Homo Sapiens
gggctcacatcaccccataaa

SEQ ID NO: 58283 - DNA, 31 bp, Homo Sapiens; identical to SEQ ID NO: 16238

SEQ ID NO: 58284 - DNA, 46 bp, Homo Sapiens; identical to SEQ ID NO: 29176

SEQ ID NO: 58285 - DNA, 29 bp, Homo Sapiens
ttcatatcattggtcgtggttgtagtccg

SEQ ID NO: 58286 - DNA, 36 bp, Homo Sapiens; identical to SEQ ID NO: 6344

SEQ ID NO: 58287 - DNA, 36 bp, Homo Sapiens; identical to SEQ ID NO: 11445

SEQ ID NO: 58288 - DNA, 46 bp, Homo Sapiens; identical to SEQ ID NO: 27701

SEQ ID NO: 58289 - DNA, 19 bp, Homo Sapiens
gcggttaggattcctggtt

SEQ ID NO: 58290 - DNA, 24 bp, Homo Sapiens
tcagtcggtagagcatcagacttt

SEQ ID NO: 58291 - DNA, 48 bp, Homo Sapiens; identical to SEQ ID NO: 29305

SEQ ID NO: 58292 - DNA, 21 bp, Homo Sapiens
agttcgagtctcggtggaacc

SEQ ID NO: 58293 - DNA, 48 bp, Homo Sapiens; identical to SEQ ID NO: 6383

SEQ ID NO: 58294 - DNA, 33 bp, Homo Sapiens; identical to SEQ ID NO: 6748

SEQ ID NO: 58295 - DNA, 33 bp, Homo Sapiens; identical to SEQ ID NO: 27144

SEQ ID NO: 58296 - DNA, 48 bp, Homo Sapiens; identical to SEQ ID NO: 6258

SEQ ID NO: 58297 - DNA, 16 bp, Homo Sapiens
accccttatttacccc

SEQ ID NO: 58298 - DNA, 22 bp, Homo Sapiens
ttcgattctcatagtcctagcc

SEQ ID NO: 58299 - DNA, 28 bp, Homo Sapiens
gtagcttacctcctcaaagcaatacact

SEQ ID NO: 58300 - DNA, 23 bp, Homo Sapiens
taaaccgaagatcacgggttcga

SEQ ID NO: 58301 - DNA, 38 bp, Homo Sapiens; identical to SEQ ID NO: 23348

SEQ ID NO: 58302 - DNA, 30 bp, Homo Sapiens; identical to SEQ ID NO: 6995

SEQ ID NO: 58303 - DNA, 30 bp, Homo Sapiens; identical to SEQ ID NO: 4209

SEQ ID NO: 58304 - DNA, 25 bp, Homo Sapiens
gtatagtggttagtactctgcgttg

SEQ ID NO: 58305 - DNA, 48 bp, Homo Sapiens; identical to SEQ ID NO: 12483

SEQ ID NO: 58306 - DNA, 33 bp, Homo Sapiens; identical to SEQ ID NO: 6349

SEQ ID NO: 58307 - DNA, 20 bp, Homo Sapiens
tagtggttatcacgtctgct

SEQ ID NO: 58308 - DNA, 19 bp, Homo Sapiens
aacacaaagcacccaactt

SEQ ID NO: 58309 - DNA, 33 bp, Homo Sapiens; identical to SEQ ID NO: 15757

SEQ ID NO: 58310 - DNA, 21 bp, Homo Sapiens
gcgttggtggtatagtggtta

SEQ ID NO: 58311 - DNA, 31 bp, Homo Sapiens; identical to SEQ ID NO: 15203

SEQ ID NO: 58312 - DNA, 19 bp, Homo Sapiens
tcgaatcccatcctcgtcg

SEQ ID NO: 58313 - DNA, 45 bp, Homo Sapiens; identical to SEQ ID NO: 17637

SEQ ID NO: 58314 - DNA, 38 bp, Homo Sapiens; identical to SEQ ID NO: 25440

SEQ ID NO: 58315 - DNA, 48 bp, Homo Sapiens; identical to SEQ ID NO: 16935

SEQ ID NO: 58316 - DNA, 34 bp, Homo Sapiens; identical to SEQ ID NO: 22537

SEQ ID NO: 58317 - DNA, 18 bp, Homo Sapiens
ttcgattcccgggcggcg

SEQ ID NO: 58318 - DNA, 16 bp, Homo Sapiens
ccagtggcctaatgga

SEQ ID NO: 58319 - DNA, 24 bp, Homo Sapiens
gctcagtcggtagagcatgggact

SEQ ID NO: 58320 - DNA, 37 bp, Homo Sapiens; identical to SEQ ID NO: 911

SEQ ID NO: 58321 - DNA, 27 bp, Homo Sapiens
atcgggcccataccccgaaaatgttgg

SEQ ID NO: 58322 - DNA, 34 bp, Homo Sapiens; identical to SEQ ID NO: 8039

SEQ ID NO: 58323 - DNA, 27 bp, Homo Sapiens
atggttagcactctggactttgaatcc

SEQ ID NO: 58324 - DNA, 37 bp, Homo Sapiens; identical to SEQ ID NO: 4001

SEQ ID NO: 58325 - DNA, 24 bp, Homo Sapiens
ggtgtaatggttagcactctggac

SEQ ID NO: 58326 - DNA, 17 bp, Homo Sapiens
aagattaagagaaccaa

SEQ ID NO: 58327 - DNA, 20 bp, Homo Sapiens
tagcactctggactttgaat

SEQ ID NO: 58328 - DNA, 20 bp, Homo Sapiens
tggtgagtatccccgcctgt

SEQ ID NO: 58329 - DNA, 16 bp, Homo Sapiens
gtcaggatggccgagc

SEQ ID NO: 58330 - DNA, 31 bp, Homo Sapiens; identical to SEQ ID NO: 2621

SEQ ID NO: 58331 - DNA, 22 bp, Homo Sapiens
gacttaagatccaatggacata

SEQ ID NO: 58332 - DNA, 24 bp, Homo Sapiens
ggttcgactcctggctggctcgcc

SEQ ID NO: 58333 - DNA, 24 bp, Homo Sapiens
taggattcctggttttcacccagg

SEQ ID NO: 58334 - DNA, 35 bp, Homo Sapiens; identical to SEQ ID NO: 1919

SEQ ID NO: 58335 - DNA, 25 bp, Homo Sapiens
cgctggttcgaatccggctcggagg

SEQ ID NO: 58336 - DNA, 33 bp, Homo Sapiens; identical to SEQ ID NO: 27269

SEQ ID NO: 58337 - DNA, 23 bp, Homo Sapiens
atagtggttagtactctgcgttg

SEQ ID NO: 58338 - DNA, 42 bp, Homo Sapiens; identical to SEQ ID NO: 17025

SEQ ID NO: 58339 - DNA, 29 bp, Homo Sapiens
gccgcggcccgggttcgattcccggtcag

SEQ ID NO: 58340 - DNA, 26 bp, Homo Sapiens
gctcagtcggtagagcatgagactct

SEQ ID NO: 58341 - DNA, 26 bp, Homo Sapiens
gcgttggtggtatagtggtaagcata

SEQ ID NO: 58342 - DNA, 48 bp, Homo Sapiens; identical to SEQ ID NO: 8801

SEQ ID NO: 58343 - DNA, 23 bp, Homo Sapiens
gggttaggcctctttttaccacc

SEQ ID NO: 58344 - DNA, 21 bp, Homo Sapiens
gtggttagtactctgcgttgt

SEQ ID NO: 58345 - DNA, 34 bp, Homo Sapiens; identical to SEQ ID NO: 15099

SEQ ID NO: 58346 - DNA, 19 bp, Homo Sapiens
agtggttagtactctgcgt

SEQ ID NO: 58347 - DNA, 21 bp, Homo Sapiens
aacattcaaaaaagagtacca

SEQ ID NO: 58348 - DNA, 48 bp, Homo Sapiens; identical to SEQ ID NO: 10752

SEQ ID NO: 58349 - DNA, 22 bp, Homo Sapiens
tcgaatccgagtcacggcacca

SEQ ID NO: 58350 - DNA, 18 bp, Homo Sapiens
ttccaagcagttgacccg

SEQ ID NO: 58351 - DNA, 18 bp, Homo Sapiens
gttaactaagtgtttgtg

SEQ ID NO: 58352 - DNA, 21 bp, Homo Sapiens
tcgagtcccaccagagtcgcc

SEQ ID NO: 58353 - DNA, 16 bp, Homo Sapiens
gtcaggatggccgagt

SEQ ID NO: 58354 - DNA, 31 bp, Homo Sapiens; identical to SEQ ID NO: 10702

SEQ ID NO: 58355 - DNA, 18 bp, Homo Sapiens
ggatggccgagtggtcta

SEQ ID NO: 58356 - DNA, 23 bp, Homo Sapiens
taagagaaccaacacctctttac

SEQ ID NO: 58357 - DNA, 36 bp, Homo Sapiens; identical to SEQ ID NO: 29577

SEQ ID NO: 58358 - DNA, 48 bp, Homo Sapiens; identical to SEQ ID NO: 23932

SEQ ID NO: 58359 - DNA, 23 bp, Homo Sapiens
tcggtagagcatgggactcttaa

SEQ ID NO: 58360 - DNA, 23 bp, Homo Sapiens
tagtggctaggattcggcgcttt

SEQ ID NO: 58361 - DNA, 29 bp, Homo Sapiens
gagtggcgcagcggaagcgtgctgggccc

SEQ ID NO: 58362 - DNA, 42 bp, Homo Sapiens; identical to SEQ ID NO: 13423

SEQ ID NO: 58363 - DNA, 16 bp, Homo Sapiens
cccacctggggtgcca

SEQ ID NO: 58364 - DNA, 29 bp, Homo Sapiens
tgggtggttcagtggtagaattctcgcct

SEQ ID NO: 58365 - DNA, 29 bp, Homo Sapiens
cgtagtgtagtggttatcacgttcgcctc

SEQ ID NO: 58366 - DNA, 30 bp, Homo Sapiens; identical to SEQ ID NO: 3403

SEQ ID NO: 58367 - DNA, 48 bp, Homo Sapiens; identical to SEQ ID NO: 4702

SEQ ID NO: 58368 - DNA, 31 bp, Homo Sapiens; identical to SEQ ID NO: 30294

SEQ ID NO: 58369 - DNA, 24 bp, Homo Sapiens
gcggcccgggttcgattcccggtc

SEQ ID NO: 58370 - DNA, 31 bp, Homo Sapiens; identical to SEQ ID NO: 10931

SEQ ID NO: 58371 - DNA, 26 bp, Homo Sapiens
tagtgtagtggtcatcacgttcgcct

SEQ ID NO: 58372 - DNA, 41 bp, Homo Sapiens; identical to SEQ ID NO: 13897

SEQ ID NO: 58373 - DNA, 46 bp, Homo Sapiens; identical to SEQ ID NO: 19946

SEQ ID NO: 58374 - DNA, 48 bp, Homo Sapiens; identical to SEQ ID NO: 29337

SEQ ID NO: 58375 - DNA, 19 bp, Homo Sapiens
gttcaatccccggcatctc

SEQ ID NO: 58376 - DNA, 28 bp, Homo Sapiens
agaaagctcacaagaactgctaactcat

SEQ ID NO: 58377 - DNA, 30 bp, Homo Sapiens; identical to SEQ ID NO: 15062

SEQ ID NO: 58378 - DNA, 21 bp, Homo Sapiens
cgattctcatagtcctagcca

SEQ ID NO: 58379 - DNA, 48 bp, Homo Sapiens; identical to SEQ ID NO: 2491

SEQ ID NO: 58380 - DNA, 17 bp, Homo Sapiens
cctcctcaaagcaatac

SEQ ID NO: 58381 - DNA, 25 bp, Homo Sapiens
cagtcggtagagcatgagactctta

SEQ ID NO: 58382 - DNA, 19 bp, Homo Sapiens
gttcgattccccgacgggg

SEQ ID NO: 58383 - DNA, 16 bp, Homo Sapiens
agagaaccaacacctc

SEQ ID NO: 58384 - DNA, 48 bp, Homo Sapiens; identical to SEQ ID NO: 1823

SEQ ID NO: 58385 - DNA, 34 bp, Homo Sapiens; identical to SEQ ID NO: 783

SEQ ID NO: 58386 - DNA, 30 bp, Homo Sapiens; identical to SEQ ID NO: 7630

SEQ ID NO: 58387 - DNA, 35 bp, Homo Sapiens; identical to SEQ ID NO: 8131

SEQ ID NO: 58388 - DNA, 33 bp, Homo Sapiens; identical to SEQ ID NO: 30192

SEQ ID NO: 58389 - DNA, 26 bp, Homo Sapiens
cagtcggtagagcatgagacccttaa

SEQ ID NO: 58390 - DNA, 42 bp, Homo Sapiens; identical to SEQ ID NO: 9544

SEQ ID NO: 58391 - DNA, 27 bp, Homo Sapiens
tagctcagtcggtagagcatgagaccc

SEQ ID NO: 58392 - DNA, 42 bp, Homo Sapiens; identical to SEQ ID NO: 25918

SEQ ID NO: 58393 - DNA, 48 bp, Homo Sapiens; identical to SEQ ID NO: 30397

SEQ ID NO: 58394 - DNA, 23 bp, Homo Sapiens
ttcgattctcatagtcctagcca

SEQ ID NO: 58395 - DNA, 20 bp, Homo Sapiens
taagtcccattggtctagcc

SEQ ID NO: 58396 - DNA, 23 bp, Homo Sapiens
gttatcacgtctgctttacacgc

SEQ ID NO: 58397 - DNA, 27 bp, Homo Sapiens
tggttagcactctggactttgaatcca

SEQ ID NO: 58398 - DNA, 20 bp, Homo Sapiens
atccttaggtcgctggttcg

SEQ ID NO: 58399 - DNA, 46 bp, Homo Sapiens; identical to SEQ ID NO: 10036

SEQ ID NO: 58400 - DNA, 19 bp, Homo Sapiens
gggccagtggcgcaatgga

SEQ ID NO: 58401 - DNA, 30 bp, Homo Sapiens; identical to SEQ ID NO: 18787

SEQ ID NO: 58402 - DNA, 30 bp, Homo Sapiens; identical to SEQ ID NO: 11357

SEQ ID NO: 58403 - DNA, 29 bp, Homo Sapiens
gttttgacaacattcaaaaaagagtacca

SEQ ID NO: 58404 - DNA, 26 bp, Homo Sapiens
agtcggtagagcatgagacccttaat

SEQ ID NO: 58405 - DNA, 48 bp, Homo Sapiens; identical to SEQ ID NO: 11909

SEQ ID NO: 58406 - DNA, 22 bp, Homo Sapiens
gggattagctcaaatggtagag

SEQ ID NO: 58407 - DNA, 28 bp, Homo Sapiens
catggtctagcggttaggattcctggtt

SEQ ID NO: 58408 - DNA, 34 bp, Homo Sapiens; identical to SEQ ID NO: 21187

SEQ ID NO: 58409 - DNA, 18 bp, Homo Sapiens
gcggttatcacgtctgct

SEQ ID NO: 58410 - DNA, 22 bp, Homo Sapiens
ttcgattcccggccaacgcacc

SEQ ID NO: 58411 - DNA, 16 bp, Homo Sapiens
ctcgcctgccacgcgg

SEQ ID NO: 58412 - DNA, 34 bp, Homo Sapiens; identical to SEQ ID NO: 15079

SEQ ID NO: 58413 - DNA, 46 bp, Homo Sapiens; identical to SEQ ID NO: 17899

SEQ ID NO: 58414 - DNA, 20 bp, Homo Sapiens
cacatcaccccataaacacc

SEQ ID NO: 58415 - DNA, 34 bp, Homo Sapiens; identical to SEQ ID NO: 15105

SEQ ID NO: 58416 - DNA, 19 bp, Homo Sapiens
agcatgggactcttaatct

SEQ ID NO: 58417 - DNA, 31 bp, Homo Sapiens; identical to SEQ ID NO: 15196

SEQ ID NO: 58418 - DNA, 23 bp, Homo Sapiens
atggtttttcatatcattggtcg

SEQ ID NO: 58419 - DNA, 30 bp, Homo Sapiens; identical to SEQ ID NO: 18082

SEQ ID NO: 58420 - DNA, 24 bp, Homo Sapiens
gttcgagccccacgttgggcgcca

SEQ ID NO: 58421 - DNA, 43 bp, Homo Sapiens; identical to SEQ ID NO: 22551

SEQ ID NO: 58422 - DNA, 39 bp, Homo Sapiens; identical to SEQ ID NO: 10310

SEQ ID NO: 58423 - DNA, 28 bp, Homo Sapiens
ggtccagggttcaagtccctgttcgggc

SEQ ID NO: 58424 - DNA, 44 bp, Homo Sapiens; identical to SEQ ID NO: 22552

SEQ ID NO: 58425 - DNA, 24 bp, Homo Sapiens
gttcgaatcccaccgctgccacca

SEQ ID NO: 58426 - DNA, 32 bp, Homo Sapiens; identical to SEQ ID NO: 10725

SEQ ID NO: 58427 - DNA, 35 bp, Homo Sapiens; identical to SEQ ID NO: 10988

SEQ ID NO: 58428 - DNA, 41 bp, Homo Sapiens; identical to SEQ ID NO: 14156

SEQ ID NO: 58429 - DNA, 48 bp, Homo Sapiens; identical to SEQ ID NO: 24088

SEQ ID NO: 58430 - DNA, 31 bp, Homo Sapiens; identical to SEQ ID NO: 26658

SEQ ID NO: 58431 - DNA, 19 bp, Homo Sapiens
gccccagtggcctaatgga

SEQ ID NO: 58432 - DNA, 29 bp, Homo Sapiens
atggtggttcagtggtagaattctcgcct

SEQ ID NO: 58433 - DNA, 18 bp, Homo Sapiens
ttgtaaaccaggggtcgc

SEQ ID NO: 58434 - DNA, 23 bp, Homo Sapiens
gtcggtagagcatgggactctta

SEQ ID NO: 58435 - DNA, 28 bp, Homo Sapiens
agtcggtagagcatgggactcttaatct

SEQ ID NO: 58436 - DNA, 42 bp, Homo Sapiens; identical to SEQ ID NO: 23938

SEQ ID NO: 58437 - DNA, 20 bp, Homo Sapiens
gaccaagagccttcaaagcc

SEQ ID NO: 58438 - DNA, 26 bp, Homo Sapiens
gggttcgattctcatagtcctagcca

SEQ ID NO: 58439 - DNA, 28 bp, Homo Sapiens
agaggcttacgaccccttatttacccca

SEQ ID NO: 58440 - DNA, 26 bp, Homo Sapiens
cggcccgggttcgactcccggtgtgg

SEQ ID NO: 58441 - DNA, 33 bp, Homo Sapiens; identical to SEQ ID NO: 503

SEQ ID NO: 58442 - DNA, 33 bp, Homo Sapiens; identical to SEQ ID NO: 21970

SEQ ID NO: 58443 - DNA, 39 bp, Homo Sapiens; identical to SEQ ID NO: 29037

SEQ ID NO: 58444 - DNA, 17 bp, Homo Sapiens
ccgcgtggcctaatgga

SEQ ID NO: 58445 - DNA, 17 bp, Homo Sapiens
aaccctgctcgctgcgc

SEQ ID NO: 58446 - DNA, 21 bp, Homo Sapiens
cagtcggtagagcataagact

SEQ ID NO: 58447 - DNA, 17 bp, Homo Sapiens
ttcgaatcccactcctg

SEQ ID NO: 58448 - DNA, 21 bp, Homo Sapiens
agtggttagtactctgcgttg

SEQ ID NO: 58449 - DNA, 25 bp, Homo Sapiens
gctcagtcggtagagcatgagactc

SEQ ID NO: 58450 - DNA, 25 bp, Homo Sapiens
gaaagctcacaagaactgctaactc

SEQ ID NO: 58451 - DNA, 34 bp, Homo Sapiens; identical to SEQ ID NO: 19911

SEQ ID NO: 58452 - DNA, 29 bp, Homo Sapiens
gtcggtagagcatgagactcttaatctca

SEQ ID NO: 58453 - DNA, 16 bp, Homo Sapiens
gacaggggttaggcct

SEQ ID NO: 58454 - DNA, 30 bp, Homo Sapiens; identical to SEQ ID NO: 7417

SEQ ID NO: 58455 - DNA, 27 bp, Homo Sapiens
agatcctgggttcgaatcccagcggtg

SEQ ID NO: 58456 - DNA, 48 bp, Homo Sapiens; identical to SEQ ID NO: 14568

SEQ ID NO: 58457 - DNA, 41 bp, Homo Sapiens; identical to SEQ ID NO: 14844

SEQ ID NO: 58458 - DNA, 29 bp, Homo Sapiens
gctctcaccgccgcggcccgggttcgatt

SEQ ID NO: 58459 - DNA, 22 bp, Homo Sapiens
ttaaatacagaccaagagcctt

SEQ ID NO: 58460 - DNA, 20 bp, Homo Sapiens
ggctctgtggcttagttggc

SEQ ID NO: 58461 - DNA, 29 bp, Homo Sapiens
gcaacctcggttcgaatccgagtcacggc

SEQ ID NO: 58462 - DNA, 16 bp, Homo Sapiens
ggttaggattcctggt

SEQ ID NO: 58463 - DNA, 22 bp, Homo Sapiens
gacaacattcaaaaaagagtac

SEQ ID NO: 58464 - DNA, 16 bp, Homo Sapiens
tttaatctgagggtcc

SEQ ID NO: 58465 - DNA, 23 bp, Homo Sapiens
ggccccatggtgtaatggttagc

SEQ ID NO: 58466 - DNA, 19 bp, Homo Sapiens
ttaggattcggcgctctca

SEQ ID NO: 58467 - DNA, 24 bp, Homo Sapiens
tcagtcggtagagcatgggactct

SEQ ID NO: 58468 - DNA, 31 bp, Homo Sapiens; identical to SEQ ID NO: 10570

SEQ ID NO: 58469 - DNA, 17 bp, Homo Sapiens
ggcctctttttaccacc

SEQ ID NO: 58470 - DNA, 24 bp, Homo Sapiens
gaagcattggactgtaaatctaaa

SEQ ID NO: 58471 - DNA, 27 bp, Homo Sapiens
tagtgtagtggttatcacgtctgcttt

SEQ ID NO: 58472 - DNA, 16 bp, Homo Sapiens
gcccggctagctcagt

SEQ ID NO: 58473 - DNA, 20 bp, Homo Sapiens
tagtggttaggattcggcgc

SEQ ID NO: 58474 - DNA, 23 bp, Homo Sapiens
tggtgtagtggtatcatgcaaga

SEQ ID NO: 58475 - DNA, 33 bp, Homo Sapiens; identical to SEQ ID NO: 1306

SEQ ID NO: 58476 - DNA, 19 bp, Homo Sapiens
agtcggtggagcatgggac

SEQ ID NO: 58477 - DNA, 23 bp, Homo Sapiens
ttaagttaaagattaagagaacc

SEQ ID NO: 58478 - DNA, 23 bp, Homo Sapiens
aagctcacaagaactgctaactc

SEQ ID NO: 58479 - DNA, 29 bp, Homo Sapiens
aaggtcctgggttcgagccccagtggaac

SEQ ID NO: 58480 - DNA, 20 bp, Homo Sapiens
tcgagtctcggtggaacctc

SEQ ID NO: 58481 - DNA, 42 bp, Homo Sapiens; identical to SEQ ID NO: 6380

SEQ ID NO: 58482 - DNA, 21 bp, Homo Sapiens
tggaggcgtgggttcgaatcc

SEQ ID NO: 58483 - DNA, 25 bp, Homo Sapiens
gggttcgattctcatagtcctagcc

SEQ ID NO: 58484 - DNA, 48 bp, Homo Sapiens; identical to SEQ ID NO: 1245

SEQ ID NO: 58485 - DNA, 26 bp, Homo Sapiens
aattgcaaattcgaagaagcagcttc

SEQ ID NO: 58486 - DNA, 32 bp, Homo Sapiens; identical to SEQ ID NO: 8562

SEQ ID NO: 58487 - DNA, 31 bp, Homo Sapiens; identical to SEQ ID NO: 9565

SEQ ID NO: 58488 - DNA, 43 bp, Homo Sapiens; identical to SEQ ID NO: 28443

SEQ ID NO: 58489 - DNA, 35 bp, Homo Sapiens; identical to SEQ ID NO: 10673

SEQ ID NO: 58490 - DNA, 24 bp, Homo Sapiens
gtgtagtggttatcacgttcgcct

SEQ ID NO: 58491 - DNA, 19 bp, Homo Sapiens
gttaactaagtgtttgtgg

SEQ ID NO: 58492 - DNA, 32 bp, Homo Sapiens; identical to SEQ ID NO: 3921

SEQ ID NO: 58493 - DNA, 48 bp, Homo Sapiens; identical to SEQ ID NO: 5129

SEQ ID NO: 58494 - DNA, 22 bp, Homo Sapiens
tagtggttatcacgtctgcttt

SEQ ID NO: 58495 - DNA, 20 bp, Homo Sapiens
gtctaggggtatgattctcg

SEQ ID NO: 58496 - DNA, 18 bp, Homo Sapiens
tggttatcacgtctgctt

SEQ ID NO: 58497 - DNA, 19 bp, Homo Sapiens
atggttagcactctggact

SEQ ID NO: 58498 - DNA, 26 bp, Homo Sapiens
ttgactgcagatcaagaggtccccgg

SEQ ID NO: 58499 - DNA, 48 bp, Homo Sapiens; identical to SEQ ID NO: 8764

SEQ ID NO: 58500 - DNA, 39 bp, Homo Sapiens; identical to SEQ ID NO: 26817

SEQ ID NO: 58501 - DNA, 23 bp, Homo Sapiens
tagtggttagtactctgcgttgt

SEQ ID NO: 58502 - DNA, 18 bp, Homo Sapiens
atcccactgctgccacca

SEQ ID NO: 58503 - DNA, 34 bp, Homo Sapiens; identical to SEQ ID NO: 15089

SEQ ID NO: 58504 - DNA, 23 bp, Homo Sapiens
taggattcggcgctttcaccgcc

SEQ ID NO: 58505 - DNA, 34 bp, Homo Sapiens; identical to SEQ ID NO: 28918

SEQ ID NO: 58506 - DNA, 29 bp, Homo Sapiens
cggctagctcagtcggtagagcatgagac

SEQ ID NO: 58507 - DNA, 19 bp, Homo Sapiens
agctgttaactaagtgttt

SEQ ID NO: 58508 - DNA, 34 bp, Homo Sapiens; identical to SEQ ID NO: 14626

SEQ ID NO: 58509 - DNA, 34 bp, Homo Sapiens; identical to SEQ ID NO: 21799

SEQ ID NO: 58510 - DNA, 44 bp, Homo Sapiens; identical to SEQ ID NO: 22002

SEQ ID NO: 58511 - DNA, 19 bp, Homo Sapiens
tctcagggatgggttcgat

SEQ ID NO: 58512 - DNA, 39 bp, Homo Sapiens; identical to SEQ ID NO: 12137

SEQ ID NO: 58513 - DNA, 20 bp, Homo Sapiens
ggtatagctcagtggtagag

SEQ ID NO: 58514 - DNA, 37 bp, Homo Sapiens; identical to SEQ ID NO: 12903

SEQ ID NO: 58515 - DNA, 28 bp, Homo Sapiens
aatggtggttcagtggtagaattctcgc

SEQ ID NO: 58516 - DNA, 17 bp, Homo Sapiens
gcagcgatggccgagtg

SEQ ID NO: 58517 - DNA, 31 bp, Homo Sapiens; identical to SEQ ID NO: 17568

SEQ ID NO: 58518 - DNA, 25 bp, Homo Sapiens
tggcagagcccggtaatcgcataaa

SEQ ID NO: 58519 - DNA, 29 bp, Homo Sapiens
ttaacacaaagcacccaacttacacttag

SEQ ID NO: 58520 - DNA, 25 bp, Homo Sapiens
ttagctgttaactaagtgtttgtgg

SEQ ID NO: 58521 - DNA, 28 bp, Homo Sapiens
gcaatggtggttcagtggtagaattctc

SEQ ID NO: 58522 - DNA, 33 bp, Homo Sapiens; identical to SEQ ID NO: 8120

SEQ ID NO: 58523 - DNA, 40 bp, Homo Sapiens; identical to SEQ ID NO: 20621

SEQ ID NO: 58524 - DNA, 33 bp, Homo Sapiens; identical to SEQ ID NO: 21141

SEQ ID NO: 58525 - DNA, 19 bp, Homo Sapiens
gaccgcgtggcctaatgga

SEQ ID NO: 58526 - DNA, 23 bp, Homo Sapiens
ctctggactctgaatccagcgat

SEQ ID NO: 58527 - DNA, 30 bp, Homo Sapiens; identical to SEQ ID NO: 12521

SEQ ID NO: 58528 - DNA, 48 bp, Homo Sapiens; identical to SEQ ID NO: 848

SEQ ID NO: 58529 - DNA, 48 bp, Homo Sapiens; identical to SEQ ID NO: 8496

SEQ ID NO: 58530 - DNA, 44 bp, Homo Sapiens; identical to SEQ ID NO: 21494

SEQ ID NO: 58531 - DNA, 29 bp, Homo Sapiens
gatgggttcgattctcatagtcctagcca

SEQ ID NO: 58532 - DNA, 23 bp, Homo Sapiens
acacgcgaaaggtccccggttcg

SEQ ID NO: 58533 - DNA, 48 bp, Homo Sapiens; identical to SEQ ID NO: 28350

SEQ ID NO: 58534 - DNA, 27 bp, Homo Sapiens
gaggcttacgaccccttatttacccca

SEQ ID NO: 58535 - DNA, 24 bp, Homo Sapiens
gctaatggtggagttaaagacttt

SEQ ID NO: 58536 - DNA, 36 bp, Homo Sapiens; identical to SEQ ID NO: 20369

SEQ ID NO: 58537 - DNA, 21 bp, Homo Sapiens
tctcagggatgggttcgattc

SEQ ID NO: 58538 - DNA, 43 bp, Homo Sapiens; identical to SEQ ID NO: 8796

SEQ ID NO: 58539 - DNA, 38 bp, Homo Sapiens; identical to SEQ ID NO: 16162

SEQ ID NO: 58540 - DNA, 20 bp, Homo Sapiens
caatccccggcacctccacc

SEQ ID NO: 58541 - DNA, 27 bp, Homo Sapiens
gctagctcagtcggtagagcatgagac

SEQ ID NO: 58542 - DNA, 22 bp, Homo Sapiens
gacgggctcacatcaccccata

SEQ ID NO: 58543 - DNA, 24 bp, Homo Sapiens
agtgtagtggtcatcacgttcgcc

SEQ ID NO: 58544 - DNA, 32 bp, Homo Sapiens; identical to SEQ ID NO: 8806

SEQ ID NO: 58545 - DNA, 19 bp, Homo Sapiens
tcgtaaaccgaagatcgcg

SEQ ID NO: 58546 - DNA, 40 bp, Homo Sapiens; identical to SEQ ID NO: 29730

SEQ ID NO: 58547 - DNA, 32 bp, Homo Sapiens; identical to SEQ ID NO: 30037

SEQ ID NO: 58548 - DNA, 17 bp, Homo Sapiens
aaaacttaaaactttac

SEQ ID NO: 58549 - DNA, 48 bp, Homo Sapiens; identical to SEQ ID NO: 9730

SEQ ID NO: 58550 - DNA, 17 bp, Homo Sapiens
tgatttcgactcattaa

SEQ ID NO: 58551 - DNA, 39 bp, Homo Sapiens; identical to SEQ ID NO: 13177

SEQ ID NO: 58552 - DNA, 22 bp, Homo Sapiens
gcgttggtggtatagtggtgag

SEQ ID NO: 58553 - DNA, 24 bp, Homo Sapiens
ggttccatagtgtagtggttatca

SEQ ID NO: 58554 - DNA, 23 bp, Homo Sapiens
ggttcgattccggctcgaaggac

SEQ ID NO: 58555 - DNA, 24 bp, Homo Sapiens
tggtctagtggctaggattcggcg

SEQ ID NO: 58556 - DNA, 20 bp, Homo Sapiens
ttaaagattaagagaaccaa

SEQ ID NO: 58557 - DNA, 29 bp, Homo Sapiens
tgtagctcagtggtagagcatttgactgc

SEQ ID NO: 58558 - DNA, 30 bp, Homo Sapiens; identical to SEQ ID NO: 27986

SEQ ID NO: 58559 - DNA, 18 bp, Homo Sapiens
gccgcgtggcctaatgga

SEQ ID NO: 58560 - DNA, 23 bp, Homo Sapiens
taagccagggattgtgggttcga

SEQ ID NO: 58561 - DNA, 35 bp, Homo Sapiens; identical to SEQ ID NO: 16852

SEQ ID NO: 58562 - DNA, 30 bp, Homo Sapiens; identical to SEQ ID NO: 18355

SEQ ID NO: 58563 - DNA, 26 bp, Homo Sapiens
cgtatagtggttagtactctgcgttg

SEQ ID NO: 58564 - DNA, 19 bp, Homo Sapiens
ggctctgtggcgcaatgga

SEQ ID NO: 58565 - DNA, 36 bp, Homo Sapiens; identical to SEQ ID NO: 7401

SEQ ID NO: 58566 - DNA, 27 bp, Homo Sapiens
ttcatatcattggtcgtggttgtagtc

SEQ ID NO: 58567 - DNA, 31 bp, Homo Sapiens; identical to SEQ ID NO: 13047

SEQ ID NO: 58568 - DNA, 18 bp, Homo Sapiens
gtggtatcatgcaagatt

SEQ ID NO: 58569 - DNA, 30 bp, Homo Sapiens; identical to SEQ ID NO: 13916

SEQ ID NO: 58570 - DNA, 31 bp, Homo Sapiens; identical to SEQ ID NO: 26642

SEQ ID NO: 58571 - DNA, 30 bp, Homo Sapiens; identical to SEQ ID NO: 7138

SEQ ID NO: 58572 - DNA, 18 bp, Homo Sapiens
aactgggcggaaacacca

SEQ ID NO: 58573 - DNA, 36 bp, Homo Sapiens; identical to SEQ ID NO: 23843

SEQ ID NO: 58574 - DNA, 22 bp, Homo Sapiens
tggtctagtggttaggattcgg

SEQ ID NO: 58575 - DNA, 16 bp, Homo Sapiens
cgcgtggcctaatgga

SEQ ID NO: 58576 - DNA, 17 bp, Homo Sapiens
aaccgggcggaaacacc

SEQ ID NO: 58577 - DNA, 40 bp, Homo Sapiens; identical to SEQ ID NO: 21196

SEQ ID NO: 58578 - DNA, 23 bp, Homo Sapiens
gttcgagtcccacctggggtgcc

SEQ ID NO: 58579 - DNA, 37 bp, Homo Sapiens; identical to SEQ ID NO: 28255

SEQ ID NO: 58580 - DNA, 20 bp, Homo Sapiens
aggggtagagcatttgactg

SEQ ID NO: 58581 - DNA, 22 bp, Homo Sapiens
ttcaagtcacgtcggggtcacc

SEQ ID NO: 58582 - DNA, 29 bp, Homo Sapiens
acatggtctagcggttaggattcctggtt

SEQ ID NO: 58583 - DNA, 21 bp, Homo Sapiens
cttaagatccaatggacatat

SEQ ID NO: 58584 - DNA, 39 bp, Homo Sapiens; identical to SEQ ID NO: 20817

SEQ ID NO: 58585 - DNA, 16 bp, Homo Sapiens
gtcgcagtctcccctg

SEQ ID NO: 58586 - DNA, 25 bp, Homo Sapiens
tagtaccgttaacttccaattaact

SEQ ID NO: 58587 - DNA, 19 bp, Homo Sapiens
gtagtgtagtggttatcac

SEQ ID NO: 58588 - DNA, 18 bp, Homo Sapiens
cttataatgccgaggttg

SEQ ID NO: 58589 - DNA, 30 bp, Homo Sapiens; identical to SEQ ID NO: 4474

SEQ ID NO: 58590 - DNA, 17 bp, Homo Sapiens
tcctcacacggggcacc

SEQ ID NO: 58591 - DNA, 22 bp, Homo Sapiens
ctgagtgaagcattggactgta

SEQ ID NO: 58592 - DNA, 16 bp, Homo Sapiens
tcctgctcacagcgcc

SEQ ID NO: 58593 - DNA, 32 bp, Homo Sapiens; identical to SEQ ID NO: 4132

SEQ ID NO: 58594 - DNA, 33 bp, Homo Sapiens; identical to SEQ ID NO: 10211

SEQ ID NO: 58595 - DNA, 35 bp, Homo Sapiens; identical to SEQ ID NO: 26852

SEQ ID NO: 58596 - DNA, 31 bp, Homo Sapiens; identical to SEQ ID NO: 205

SEQ ID NO: 58597 - DNA, 34 bp, Homo Sapiens; identical to SEQ ID NO: 4263

SEQ ID NO: 58598 - DNA, 31 bp, Homo Sapiens; identical to SEQ ID NO: 9949

SEQ ID NO: 58599 - DNA, 23 bp, Homo Sapiens
taggtcgctggttcgaatccggc

SEQ ID NO: 58600 - DNA, 32 bp, Homo Sapiens; identical to SEQ ID NO: 17841

SEQ ID NO: 58601 - DNA, 18 bp, Homo Sapiens
gcgctctcaccgccgcgg

SEQ ID NO: 58602 - DNA, 27 bp, Homo Sapiens
tgggttcgattctcatagtcctagcca

SEQ ID NO: 58603 - DNA, 32 bp, Homo Sapiens; identical to SEQ ID NO: 15286

SEQ ID NO: 58604 - DNA, 19 bp, Homo Sapiens
tggttagtactctgcgttg

SEQ ID NO: 58605 - DNA, 30 bp, Homo Sapiens; identical to SEQ ID NO: 7068

SEQ ID NO: 58606 - DNA, 18 bp, Homo Sapiens
caggggttagagcactgg

SEQ ID NO: 58607 - DNA, 21 bp, Homo Sapiens
ttcacccaggcggcccgggtt

SEQ ID NO: 58608 - DNA, 38 bp, Homo Sapiens; identical to SEQ ID NO: 6718

SEQ ID NO: 58609 - DNA, 18 bp, Homo Sapiens
agtggtagaattctcacc

SEQ ID NO: 58610 - DNA, 35 bp, Homo Sapiens; identical to SEQ ID NO: 24059

SEQ ID NO: 58611 - DNA, 17 bp, Homo Sapiens
tggttaggattcagcgc

SEQ ID NO: 58612 - DNA, 21 bp, Homo Sapiens
tgtagtcgtggccgagtggtt

SEQ ID NO: 58613 - DNA, 16 bp, Homo Sapiens
gactttttctctgacc

SEQ ID NO: 58614 - DNA, 21 bp, Homo Sapiens
agtaaggtcagctaaataagc

SEQ ID NO: 58615 - DNA, 26 bp, Homo Sapiens
ggtctagtggttaggattcggcgctc

SEQ ID NO: 58616 - DNA, 29 bp, Homo Sapiens
atagctcagtcggtagagcatcagacttt

SEQ ID NO: 58617 - DNA, 44 bp, Homo Sapiens; identical to SEQ ID NO: 27629

SEQ ID NO: 58618 - DNA, 17 bp, Homo Sapiens
tggttagtactctgcgt

SEQ ID NO: 58619 - DNA, 46 bp, Homo Sapiens; identical to SEQ ID NO: 58

SEQ ID NO: 58620 - DNA, 38 bp, Homo Sapiens; identical to SEQ ID NO: 11948

SEQ ID NO: 58621 - DNA, 19 bp, Homo Sapiens
gttcgactcccagtggggc

SEQ ID NO: 58622 - DNA, 23 bp, Homo Sapiens
gcgctctcaccgccgcggcccgg

SEQ ID NO: 58623 - DNA, 36 bp, Homo Sapiens; identical to SEQ ID NO: 11903

SEQ ID NO: 58624 - DNA, 25 bp, Homo Sapiens
ggttcgagtcctgccgcggtcgcca

SEQ ID NO: 58625 - DNA, 26 bp, Homo Sapiens
gctggtgtagtggtatcatgcaagat

SEQ ID NO: 58626 - DNA, 48 bp, Homo Sapiens; identical to SEQ ID NO: 18318

SEQ ID NO: 58627 - DNA, 25 bp, Homo Sapiens
ccccgcgcaggttcgaatcctgccg

SEQ ID NO: 58628 - DNA, 25 bp, Homo Sapiens
cccgaaaatgttggttatacccttc

SEQ ID NO: 58629 - DNA, 16 bp, Homo Sapiens
cgcccggctagctcag

SEQ ID NO: 58630 - DNA, 30 bp, Homo Sapiens; identical to SEQ ID NO: 2849

SEQ ID NO: 58631 - DNA, 24 bp, Homo Sapiens
agcagagtggcgcagcggaagcgt

SEQ ID NO: 58632 - DNA, 18 bp, Homo Sapiens
acgaatgatttcgactca

SEQ ID NO: 58633 - DNA, 28 bp, Homo Sapiens
cggatagctcagtcggtagagcatcaga

SEQ ID NO: 58634 - DNA, 17 bp, Homo Sapiens
cttacctcctcaaagca

SEQ ID NO: 58635 - DNA, 29 bp, Homo Sapiens
tcgcgggttcgaaccccgtacgggccacc

SEQ ID NO: 58636 - DNA, 46 bp, Homo Sapiens; identical to SEQ ID NO: 7746

SEQ ID NO: 58637 - DNA, 31 bp, Homo Sapiens; identical to SEQ ID NO: 8322

SEQ ID NO: 58638 - DNA, 34 bp, Homo Sapiens; identical to SEQ ID NO: 8925

SEQ ID NO: 58639 - DNA, 26 bp, Homo Sapiens
ccgggttcgattcccgggcggcgcac

SEQ ID NO: 58640 - DNA, 37 bp, Homo Sapiens; identical to SEQ ID NO: 18089

SEQ ID NO: 58641 - DNA, 24 bp, Homo Sapiens
gagaaccaacacctctttacagtg

SEQ ID NO: 58642 - DNA, 33 bp, Homo Sapiens; identical to SEQ ID NO: 18693

SEQ ID NO: 58643 - DNA, 22 bp, Homo Sapiens
gtagtgtagcggttatcacatt

SEQ ID NO: 58644 - DNA, 27 bp, Homo Sapiens
tgaatccagcgatccgagttcgagtct

SEQ ID NO: 58645 - DNA, 23 bp, Homo Sapiens
gtcacggtggccgagtggttaag

SEQ ID NO: 58646 - DNA, 23 bp, Homo Sapiens
attagggtgcttagctgttaact

SEQ ID NO: 58647 - DNA, 23 bp, Homo Sapiens
cttagcattaaccttttaagtta

SEQ ID NO: 58648 - DNA, 32 bp, Homo Sapiens; identical to SEQ ID NO: 21140

SEQ ID NO: 58649 - DNA, 26 bp, Homo Sapiens
aggcttacgaccccttatttacccca

SEQ ID NO: 58650 - DNA, 19 bp, Homo Sapiens
ttcaaacctgccggggctt

SEQ ID NO: 58651 - DNA, 35 bp, Homo Sapiens; identical to SEQ ID NO: 16837

SEQ ID NO: 58652 - DNA, 18 bp, Homo Sapiens
caatacttaatttctgcc

SEQ ID NO: 58653 - DNA, 19 bp, Homo Sapiens
cgtggccgagtggttaagg

SEQ ID NO: 58654 - DNA, 30 bp, Homo Sapiens; identical to SEQ ID NO: 26623

SEQ ID NO: 58655 - DNA, 40 bp, Homo Sapiens; identical to SEQ ID NO: 26752

SEQ ID NO: 58656 - DNA, 40 bp, Homo Sapiens; identical to SEQ ID NO: 26823

SEQ ID NO: 58657 - DNA, 23 bp, Homo Sapiens
gtgaagcattggactgtaaatct

SEQ ID NO: 58658 - DNA, 19 bp, Homo Sapiens
caaatctcggtggaacctc

SEQ ID NO: 58659 - DNA, 27 bp, Homo Sapiens
cgttggtggtatagtggttagcatagc

SEQ ID NO: 58660 - DNA, 18 bp, Homo Sapiens
atggaggccatggggttg

SEQ ID NO: 58661 - DNA, 23 bp, Homo Sapiens
agactcaagttctggtctccgga

SEQ ID NO: 58662 - DNA, 25 bp, Homo Sapiens
agaagcagcttcaaacctgccgggg

SEQ ID NO: 58663 - DNA, 27 bp, Homo Sapiens
agtaagttgcaatacttaatttctgcc

SEQ ID NO: 58664 - DNA, 34 bp, Homo Sapiens; identical to SEQ ID NO: 25596

SEQ ID NO: 58665 - DNA, 24 bp, Homo Sapiens
gttcaattccccgacggggagcca

SEQ ID NO: 58666 - DNA, 22 bp, Homo Sapiens
tcaattctcgctggggcctcca

SEQ ID NO: 58667 - DNA, 19 bp, Homo Sapiens
agaaatatgtctgataaaa

SEQ ID NO: 58668 - DNA, 20 bp, Homo Sapiens
aggtcctgggttcgagcccc

SEQ ID NO: 58669 - DNA, 19 bp, Homo Sapiens
tctaaaggtccctggttcg

SEQ ID NO: 58670 - DNA, 25 bp, Homo Sapiens
gcagcttcaaacctgccggggcttc

SEQ ID NO: 58671 - DNA, 18 bp, Homo Sapiens
attaactagttttgacaa

SEQ ID NO: 58672 - DNA, 30 bp, Homo Sapiens; identical to SEQ ID NO: 15773

SEQ ID NO: 58673 - DNA, 36 bp, Homo Sapiens; identical to SEQ ID NO: 4154

SEQ ID NO: 58674 - DNA, 19 bp, Homo Sapiens
cagaccaagagccttcaaa

SEQ ID NO: 58675 - DNA, 45 bp, Homo Sapiens; identical to SEQ ID NO: 9933

SEQ ID NO: 58676 - DNA, 17 bp, Homo Sapiens
ttgcgttcagttgatgc

SEQ ID NO: 58677 - DNA, 16 bp, Homo Sapiens
cagcgatccgagttcg

SEQ ID NO: 58678 - DNA, 40 bp, Homo Sapiens; identical to SEQ ID NO: 538

SEQ ID NO: 58679 - DNA, 35 bp, Homo Sapiens; identical to SEQ ID NO: 8027

SEQ ID NO: 58680 - DNA, 37 bp, Homo Sapiens; identical to SEQ ID NO: 10835

SEQ ID NO: 58681 - DNA, 31 bp, Homo Sapiens; identical to SEQ ID NO: 12247

SEQ ID NO: 58682 - DNA, 27 bp, Homo Sapiens
gcagcttcaaacctgccggggcttcca

SEQ ID NO: 58683 - DNA, 41 bp, Homo Sapiens; identical to SEQ ID NO: 19129

SEQ ID NO: 58684 - DNA, 32 bp, Homo Sapiens; identical to SEQ ID NO: 25184

SEQ ID NO: 58685 - DNA, 30 bp, Homo Sapiens; identical to SEQ ID NO: 19439

SEQ ID NO: 58686 - DNA, 29 bp, Homo Sapiens
cagaggcttacgaccccttatttacccca

SEQ ID NO: 58687 - DNA, 23 bp, Homo Sapiens
tcagtcggtagagcatgagactc

SEQ ID NO: 58688 - DNA, 17 bp, Homo Sapiens
acgaatgatttcgactc

SEQ ID NO: 58689 - DNA, 16 bp, Homo Sapiens
tccgtggcgcaatgga

SEQ ID NO: 58690 - DNA, 18 bp, Homo Sapiens
aaaaaccatttcataact

SEQ ID NO: 58691 - DNA, 20 bp, Homo Sapiens
gagcatgggactcttaatcc

SEQ ID NO: 58692 - DNA, 47 bp, Homo Sapiens; identical to SEQ ID NO: 19346

SEQ ID NO: 58693 - DNA, 20 bp, Homo Sapiens
atggttagcactctggactc

SEQ ID NO: 58694 - DNA, 19 bp, Homo Sapiens
gccccggtggcctaatgga

SEQ ID NO: 58695 - DNA, 22 bp, Homo Sapiens
gtttgtgggtttaagtcccatt

SEQ ID NO: 58696 - DNA, 18 bp, Homo Sapiens
tacccttcccgtactacc

SEQ ID NO: 58697 - DNA, 18 bp, Homo Sapiens
tcaaacctgccggggctt

SEQ ID NO: 58698 - DNA, 18 bp, Homo Sapiens
tttgcgttcagttgatgc

SEQ ID NO: 58699 - DNA, 26 bp, Homo Sapiens
cgcgggagaccggggttcaattcccc

SEQ ID NO: 58700 - DNA, 25 bp, Homo Sapiens
gagatgaaaacctttttccaaggac

SEQ ID NO: 58701 - DNA, 33 bp, Homo Sapiens; identical to SEQ ID NO: 26525

SEQ ID NO: 58702 - DNA, 29 bp, Homo Sapiens
ggtggtctagtggttaggattcggcgctc

SEQ ID NO: 58703 - DNA, 34 bp, Homo Sapiens; identical to SEQ ID NO: 19935

SEQ ID NO: 58704 - DNA, 27 bp, Homo Sapiens
agtcggtagagcatcagacttttaatc

SEQ ID NO: 58705 - DNA, 23 bp, Homo Sapiens
tggttcgattccggctcgaagga

SEQ ID NO: 58706 - DNA, 47 bp, Homo Sapiens; identical to SEQ ID NO: 1244

SEQ ID NO: 58707 - DNA, 32 bp, Homo Sapiens; identical to SEQ ID NO: 16988

SEQ ID NO: 58708 - DNA, 43 bp, Homo Sapiens; identical to SEQ ID NO: 1550

SEQ ID NO: 58709 - DNA, 16 bp, Homo Sapiens
gatccttaggtcgctg

SEQ ID NO: 58710 - DNA, 46 bp, Homo Sapiens; identical to SEQ ID NO: 22941

SEQ ID NO: 58711 - DNA, 32 bp, Homo Sapiens; identical to SEQ ID NO: 24640

SEQ ID NO: 58712 - DNA, 20 bp, Homo Sapiens
tggttagtactctgcgttgt

SEQ ID NO: 58713 - DNA, 29 bp, Homo Sapiens
gtcgtggttgtagtccgtgcgagaatacc

SEQ ID NO: 58714 - DNA, 19 bp, Homo Sapiens
atccccagtacctccacca

SEQ ID NO: 58715 - DNA, 28 bp, Homo Sapiens
tagctcagtcggtagagcatcagacttt

SEQ ID NO: 58716 - DNA, 43 bp, Homo Sapiens; identical to SEQ ID NO: 16572

SEQ ID NO: 58717 - DNA, 16 bp, Homo Sapiens
agcttcaaacctgccg

SEQ ID NO: 58718 - DNA, 29 bp, Homo Sapiens
attctcgcctgccacgcgggaggcccggg

SEQ ID NO: 58719 - DNA, 30 bp, Homo Sapiens; identical to SEQ ID NO: 8406

SEQ ID NO: 58720 - DNA, 31 bp, Homo Sapiens; identical to SEQ ID NO: 10276

SEQ ID NO: 58721 - DNA, 39 bp, Homo Sapiens; identical to SEQ ID NO: 14373

SEQ ID NO: 58722 - DNA, 25 bp, Homo Sapiens
ttagaatcttagctttgggtgctaa

SEQ ID NO: 58723 - DNA, 24 bp, Homo Sapiens
gttcgattctcatagtcctagcca

SEQ ID NO: 58724 - DNA, 17 bp, Homo Sapiens
ggttccatagtgtagtg

SEQ ID NO: 58725 - DNA, 26 bp, Homo Sapiens
atcgtatagtggttagtactctgcgt

SEQ ID NO: 58726 - DNA, 28 bp, Homo Sapiens
acttaggagatttcaacttaacttgacc

SEQ ID NO: 58727 - DNA, 33 bp, Homo Sapiens; identical to SEQ ID NO: 2707

SEQ ID NO: 58728 - DNA, 32 bp, Homo Sapiens; identical to SEQ ID NO: 17616

SEQ ID NO: 58729 - DNA, 23 bp, Homo Sapiens
caacttaacttgaccgctctgac

SEQ ID NO: 58730 - DNA, 17 bp, Homo Sapiens
actgggcggaaacacca

SEQ ID NO: 58731 - DNA, 17 bp, Homo Sapiens
aactgggcggaaacacc

SEQ ID NO: 58732 - DNA, 31 bp, Homo Sapiens; identical to SEQ ID NO: 3523

SEQ ID NO: 58733 - DNA, 27 bp, Homo Sapiens
gaaagctcacaagaactgctaactcat

SEQ ID NO: 58734 - DNA, 31 bp, Homo Sapiens; identical to SEQ ID NO: 15486

SEQ ID NO: 58735 - DNA, 28 bp, Homo Sapiens
ggttaggattcggcgctctcaccgccgc

SEQ ID NO: 58736 - DNA, 25 bp, Homo Sapiens
tggtggagttaaagactttttctct

SEQ ID NO: 58737 - DNA, 48 bp, Homo Sapiens; identical to SEQ ID NO: 28863

SEQ ID NO: 58738 - DNA, 21 bp, Homo Sapiens
tgagtgaagcattggactgta

SEQ ID NO: 58739 - DNA, 24 bp, Homo Sapiens
ggctcacatcaccccataaacacc

SEQ ID NO: 58740 - DNA, 23 bp, Homo Sapiens
gtaatggtgagcactctggactc

SEQ ID NO: 58741 - DNA, 27 bp, Homo Sapiens
agaaccaacacctctttacagtgacca

SEQ ID NO: 58742 - DNA, 23 bp, Homo Sapiens
gctcagtcggtagagcatgagac

SEQ ID NO: 58743 - DNA, 18 bp, Homo Sapiens
gtggttatcacgtctgct

SEQ ID NO: 58744 - DNA, 27 bp, Homo Sapiens
aaagctcacaagaactgctaactcatg

SEQ ID NO: 58745 - DNA, 18 bp, Homo Sapiens
gttcgattcccggccaat

SEQ ID NO: 58746 - DNA, 16 bp, Homo Sapiens
gttaggattcctggtt

SEQ ID NO: 58747 - DNA, 33 bp, Homo Sapiens; identical to SEQ ID NO: 11073

SEQ ID NO: 58748 - DNA, 28 bp, Homo Sapiens
cgcgggaggcccgggttcgattcccggc

SEQ ID NO: 58749 - DNA, 32 bp, Homo Sapiens; identical to SEQ ID NO: 14910

SEQ ID NO: 58750 - DNA, 36 bp, Homo Sapiens; identical to SEQ ID NO: 16666

SEQ ID NO: 58751 - DNA, 27 bp, Homo Sapiens
tagctcagtcggtagagcatgagactc

SEQ ID NO: 58752 - DNA, 33 bp, Homo Sapiens; identical to SEQ ID NO: 28539

SEQ ID NO: 58753 - DNA, 37 bp, Homo Sapiens; identical to SEQ ID NO: 28995

SEQ ID NO: 58754 - DNA, 16 bp, Homo Sapiens
ttaatctcagggtcgt

SEQ ID NO: 58755 - DNA, 21 bp, Homo Sapiens
catgggtggttcagtggtaga

SEQ ID NO: 58756 - DNA, 35 bp, Homo Sapiens; identical to SEQ ID NO: 23713

SEQ ID NO: 58757 - DNA, 18 bp, Homo Sapiens
catttcgatggcgtgggt

SEQ ID NO: 58758 - DNA, 35 bp, Homo Sapiens; identical to SEQ ID NO: 14588

SEQ ID NO: 58759 - DNA, 31 bp, Homo Sapiens; identical to SEQ ID NO: 131

SEQ ID NO: 58760 - DNA, 16 bp, Homo Sapiens
agaaagctcacaagaa

SEQ ID NO: 58761 - DNA, 48 bp, Homo Sapiens; identical to SEQ ID NO: 10037

SEQ ID NO: 58762 - DNA, 16 bp, Homo Sapiens
gggagaccggggttcg

SEQ ID NO: 58763 - DNA, 44 bp, Homo Sapiens; identical to SEQ ID NO: 28044

SEQ ID NO: 58764 - DNA, 21 bp, Homo Sapiens
tcagtcggtagagcatcagac

SEQ ID NO: 58765 - DNA, 28 bp, Homo Sapiens
cgtggttgtagtccgtgcgagaatacca

SEQ ID NO: 58766 - DNA, 26 bp, Homo Sapiens
caggggttaggcctctttttaccacc

SEQ ID NO: 58767 - DNA, 32 bp, Homo Sapiens; identical to SEQ ID NO: 19363

SEQ ID NO: 58768 - DNA, 38 bp, Homo Sapiens; identical to SEQ ID NO: 3082

SEQ ID NO: 58769 - DNA, 24 bp, Homo Sapiens
tgtagcggttatcacattcgcctc

SEQ ID NO: 58770 - DNA, 18 bp, Homo Sapiens
aaccgggcggaaacacca

SEQ ID NO: 58771 - DNA, 27 bp, Homo Sapiens
atcagaagattctaggttcgactcctg

SEQ ID NO: 58772 - DNA, 16 bp, Homo Sapiens
cagagcatttgactgc

SEQ ID NO: 58773 - DNA, 37 bp, Homo Sapiens; identical to SEQ ID NO: 20619

SEQ ID NO: 58774 - DNA, 34 bp, Homo Sapiens; identical to SEQ ID NO: 28007

SEQ ID NO: 58775 - DNA, 23 bp, Homo Sapiens
gttgtagtccgtgcgagaatacc

SEQ ID NO: 58776 - DNA, 21 bp, Homo Sapiens
gctcacaagaactgctaactc

SEQ ID NO: 58777 - DNA, 20 bp, Homo Sapiens
aacaacatggctttctcacc

SEQ ID NO: 58778 - DNA, 33 bp, Homo Sapiens; identical to SEQ ID NO: 24042

SEQ ID NO: 58779 - DNA, 36 bp, Homo Sapiens; identical to SEQ ID NO: 26853

SEQ ID NO: 58780 - DNA, 34 bp, Homo Sapiens; identical to SEQ ID NO: 6212

SEQ ID NO: 58781 - DNA, 16 bp, Homo Sapiens
tccttaggtcgctggt

SEQ ID NO: 58782 - DNA, 47 bp, Homo Sapiens; identical to SEQ ID NO: 8800

SEQ ID NO: 58783 - DNA, 16 bp, Homo Sapiens
tgtccgcgtgggttcg

SEQ ID NO: 58784 - DNA, 23 bp, Homo Sapiens
tgtagtggttatcacgtctgctt

SEQ ID NO: 58785 - DNA, 48 bp, Homo Sapiens; identical to SEQ ID NO: 1555

SEQ ID NO: 58786 - DNA, 37 bp, Homo Sapiens; identical to SEQ ID NO: 6717

SEQ ID NO: 58787 - DNA, 19 bp, Homo Sapiens
atgcccccatgtctaacaa

SEQ ID NO: 58788 - DNA, 31 bp, Homo Sapiens; identical to SEQ ID NO: 7037

SEQ ID NO: 58789 - DNA, 33 bp, Homo Sapiens; identical to SEQ ID NO: 9964

SEQ ID NO: 58790 - DNA, 20 bp, Homo Sapiens
tagtggttagtactctgcgt

SEQ ID NO: 58791 - DNA, 30 bp, Homo Sapiens; identical to SEQ ID NO: 17317

SEQ ID NO: 58792 - DNA, 30 bp, Homo Sapiens; identical to SEQ ID NO: 24949

SEQ ID NO: 58793 - DNA, 20 bp, Homo Sapiens
tgtttagacgggctcacatc

SEQ ID NO: 58794 - DNA, 33 bp, Homo Sapiens; identical to SEQ ID NO: 16633

SEQ ID NO: 58795 - DNA, 16 bp, Homo Sapiens
ccagtggcgcaatgga

SEQ ID NO: 58796 - DNA, 26 bp, Homo Sapiens
agctcagtcggtagagcatgagactc

SEQ ID NO: 58797 - DNA, 18 bp, Homo Sapiens
atcagattgtgaatctga

SEQ ID NO: 58798 - DNA, 29 bp, Homo Sapiens
gctagctcagtcggtagagcatgagactc

SEQ ID NO: 58799 - DNA, 35 bp, Homo Sapiens; identical to SEQ ID NO: 6213

SEQ ID NO: 58800 - DNA, 37 bp, Homo Sapiens; identical to SEQ ID NO: 10600

SEQ ID NO: 58801 - DNA, 40 bp, Homo Sapiens; identical to SEQ ID NO: 1023

SEQ ID NO: 58802 - DNA, 19 bp, Homo Sapiens
agtggttaaggcgttggac

SEQ ID NO: 58803 - DNA, 45 bp, Homo Sapiens; identical to SEQ ID NO: 15427

SEQ ID NO: 58804 - DNA, 42 bp, Homo Sapiens; identical to SEQ ID NO: 29008

SEQ ID NO: 58805 - DNA, 19 bp, Homo Sapiens
ggctccgtggcgcaatgga

SEQ ID NO: 58806 - DNA, 28 bp, Homo Sapiens
gtgatcgtatagtggttagtactctgcg

SEQ ID NO: 58807 - DNA, 24 bp, Homo Sapiens
gggttaggcctctttttaccacca

SEQ ID NO: 58808 - DNA, 26 bp, Homo Sapiens
gatgaaaacctttttccaaggacacc

SEQ ID NO: 58809 - DNA, 34 bp, Homo Sapiens; identical to SEQ ID NO: 16851

SEQ ID NO: 58810 - DNA, 17 bp, Homo Sapiens
ttcctcttcttaacacc

SEQ ID NO: 58811 - DNA, 18 bp, Homo Sapiens
tcaaagcaatacactgaa

SEQ ID NO: 58812 - DNA, 28 bp, Homo Sapiens
gaaagctcacaagaactgctaactcatg

SEQ ID NO: 58813 - DNA, 19 bp, Homo Sapiens
taaaccgaagatcgcgggt

SEQ ID NO: 58814 - DNA, 44 bp, Homo Sapiens; identical to SEQ ID NO: 19944

SEQ ID NO: 58815 - DNA, 19 bp, Homo Sapiens
ggtcccatggtgtaatggt

SEQ ID NO: 58816 - DNA, 39 bp, Homo Sapiens; identical to SEQ ID NO: 10651

SEQ ID NO: 58817 - DNA, 34 bp, Homo Sapiens; identical to SEQ ID NO: 29264

SEQ ID NO: 58818 - DNA, 26 bp, Homo Sapiens
atagctcagtggtagagcatttgact

SEQ ID NO: 58819 - DNA, 23 bp, Homo Sapiens
gttagcactctggactttgaatc

SEQ ID NO: 58820 - DNA, 29 bp, Homo Sapiens
tctggactctgaatccagcgatccgagtt

SEQ ID NO: 58821 - DNA, 24 bp, Homo Sapiens
gttcgaatcctgccgactacgcca

SEQ ID NO: 58822 - DNA, 25 bp, Homo Sapiens
tagctcagtcggtagagcatcagac

SEQ ID NO: 58823 - DNA, 26 bp, Homo Sapiens
atagctcagtcggtagagcatcagac

SEQ ID NO: 58824 - DNA, 32 bp, Homo Sapiens; identical to SEQ ID NO: 9804

SEQ ID NO: 58825 - DNA, 23 bp, Homo Sapiens
acccaacttacacttaggagatt

SEQ ID NO: 58826 - DNA, 45 bp, Homo Sapiens; identical to SEQ ID NO: 14160

SEQ ID NO: 58827 - DNA, 37 bp, Homo Sapiens; identical to SEQ ID NO: 16382

SEQ ID NO: 58828 - DNA, 41 bp, Homo Sapiens; identical to SEQ ID NO: 21061

SEQ ID NO: 58829 - DNA, 40 bp, Homo Sapiens; identical to SEQ ID NO: 22230

SEQ ID NO: 58830 - DNA, 33 bp, Homo Sapiens; identical to SEQ ID NO: 23198

SEQ ID NO: 58831 - DNA, 48 bp, Homo Sapiens; identical to SEQ ID NO: 30047

SEQ ID NO: 58832 - DNA, 20 bp, Homo Sapiens
cagtcggtagagcatcagac

SEQ ID NO: 58833 - DNA, 23 bp, Homo Sapiens
ctagtggttaggattcggcgctc

SEQ ID NO: 58834 - DNA, 17 bp, Homo Sapiens
cattcttgcgacccggg

SEQ ID NO: 58835 - DNA, 20 bp, Homo Sapiens
cacaagaactgctaactcat

SEQ ID NO: 58836 - DNA, 35 bp, Homo Sapiens; identical to SEQ ID NO: 10909

SEQ ID NO: 58837 - DNA, 32 bp, Homo Sapiens; identical to SEQ ID NO: 17360

SEQ ID NO: 58838 - DNA, 25 bp, Homo Sapiens
agattgtgaatctgacaacagaggc

SEQ ID NO: 58839 - DNA, 37 bp, Homo Sapiens; identical to SEQ ID NO: 19718

SEQ ID NO: 58840 - DNA, 47 bp, Homo Sapiens; identical to SEQ ID NO: 19947

SEQ ID NO: 58841 - DNA, 21 bp, Homo Sapiens
tagctgttaactaagtgtttg

SEQ ID NO: 58842 - DNA, 26 bp, Homo Sapiens
agaaagctcacaagaactgctaactc

SEQ ID NO: 58843 - DNA, 29 bp, Homo Sapiens
atccattggtcttaggccccaaaaatttt

SEQ ID NO: 58844 - DNA, 39 bp, Homo Sapiens; identical to SEQ ID NO: 7909

SEQ ID NO: 58845 - DNA, 48 bp, Homo Sapiens; identical to SEQ ID NO: 13480

SEQ ID NO: 58846 - DNA, 18 bp, Homo Sapiens
ggggttcgattccttcct

SEQ ID NO: 58847 - DNA, 36 bp, Homo Sapiens; identical to SEQ ID NO: 19222

SEQ ID NO: 58848 - DNA, 33 bp, Homo Sapiens; identical to SEQ ID NO: 28596

SEQ ID NO: 58849 - DNA, 18 bp, Homo Sapiens
aagactttttctctgacc

SEQ ID NO: 58850 - DNA, 36 bp, Homo Sapiens; identical to SEQ ID NO: 14589

SEQ ID NO: 58851 - DNA, 36 bp, Homo Sapiens; identical to SEQ ID NO: 30350

SEQ ID NO: 58852 - DNA, 24 bp, Homo Sapiens
agctcagtcggtagagcatgagac

SEQ ID NO: 58853 - DNA, 18 bp, Homo Sapiens
tggttcagtggtagaatt

SEQ ID NO: 58854 - DNA, 24 bp, Homo Sapiens
ctcttaatctcagggtcgtgggtt

SEQ ID NO: 58855 - DNA, 24 bp, Homo Sapiens
ggagcttaaacccccttatttcta

SEQ ID NO: 58856 - DNA, 18 bp, Homo Sapiens
agatttcaacttaacttg

SEQ ID NO: 58857 - DNA, 17 bp, Homo Sapiens
atccgagtcacggcacc

SEQ ID NO: 58858 - DNA, 31 bp, Homo Sapiens; identical to SEQ ID NO: 4233

SEQ ID NO: 58859 - DNA, 27 bp, Homo Sapiens
caggtggcccgggttcgactcccggta

SEQ ID NO: 58860 - DNA, 32 bp, Homo Sapiens; identical to SEQ ID NO: 10267

SEQ ID NO: 58861 - DNA, 19 bp, Homo Sapiens
cgattcccggccaacgcac

SEQ ID NO: 58862 - DNA, 37 bp, Homo Sapiens; identical to SEQ ID NO: 20913

SEQ ID NO: 58863 - DNA, 35 bp, Homo Sapiens; identical to SEQ ID NO: 22476

SEQ ID NO: 58864 - DNA, 40 bp, Homo Sapiens; identical to SEQ ID NO: 25916

SEQ ID NO: 58865 - DNA, 40 bp, Homo Sapiens; identical to SEQ ID NO: 28499

SEQ ID NO: 58866 - DNA, 16 bp, Homo Sapiens
ttagcgcagtaggtag

SEQ ID NO: 58867 - DNA, 20 bp, Homo Sapiens
taaagactttttctctgacc

SEQ ID NO: 58868 - DNA, 24 bp, Homo Sapiens
atcattggtcgtggttgtagtccg

SEQ ID NO: 58869 - DNA, 20 bp, Homo Sapiens
ttacgaccccttatttaccc

SEQ ID NO: 58870 - DNA, 25 bp, Homo Sapiens
agtgtagtggtcatcacgttcgcct

SEQ ID NO: 58871 - DNA, 23 bp, Homo Sapiens
gactctgaatccagcgatccgag

SEQ ID NO: 58872 - DNA, 18 bp, Homo Sapiens
actcatgcccccatgtct

SEQ ID NO: 58873 - DNA, 18 bp, Homo Sapiens
aatagtaccgttaacttc

SEQ ID NO: 58874 - DNA, 16 bp, Homo Sapiens
ttcccattcttgcgac

SEQ ID NO: 58875 - DNA, 19 bp, Homo Sapiens
aagacaggggttaggcctc

SEQ ID NO: 58876 - DNA, 16 bp, Homo Sapiens
cgtagtgtagtggtca

SEQ ID NO: 58877 - DNA, 26 bp, Homo Sapiens
gtggtatagtggtgagcatagctgcc

SEQ ID NO: 58878 - DNA, 36 bp, Homo Sapiens; identical to SEQ ID NO: 9299

SEQ ID NO: 58879 - DNA, 32 bp, Homo Sapiens; identical to SEQ ID NO: 12032

SEQ ID NO: 58880 - DNA, 35 bp, Homo Sapiens; identical to SEQ ID NO: 12750

SEQ ID NO: 58881 - DNA, 39 bp, Homo Sapiens; identical to SEQ ID NO: 13185

SEQ ID NO: 58882 - DNA, 23 bp, Homo Sapiens
gtaatggttagcactctggactc

SEQ ID NO: 58883 - DNA, 23 bp, Homo Sapiens
gcgttggtggtatagtggttagc

SEQ ID NO: 58884 - DNA, 23 bp, Homo Sapiens
gcccccatgtctaacaacatggc

SEQ ID NO: 58885 - DNA, 29 bp, Homo Sapiens
ggagatgaaaacctttttccaaggacacc

SEQ ID NO: 58886 - DNA, 33 bp, Homo Sapiens; identical to SEQ ID NO: 27532

SEQ ID NO: 58887 - DNA, 28 bp, Homo Sapiens
gttaactaagtgtttgtgggtttaagtc

SEQ ID NO: 58888 - DNA, 17 bp, Homo Sapiens
caagtccctgttcgggc

SEQ ID NO: 58889 - DNA, 25 bp, Homo Sapiens
ggggttcgattccttccttttttgc

SEQ ID NO: 58890 - DNA, 46 bp, Homo Sapiens; identical to SEQ ID NO: 8799

SEQ ID NO: 58891 - DNA, 26 bp, Homo Sapiens
gtggttatcacgttcgcctcacacgc

SEQ ID NO: 58892 - DNA, 21 bp, Homo Sapiens
tagcggttatcacattcgcct

SEQ ID NO: 58893 - DNA, 23 bp, Homo Sapiens
tctgaaggtcctgagttcgaacc

SEQ ID NO: 58894 - DNA, 39 bp, Homo Sapiens; identical to SEQ ID NO: 3182

SEQ ID NO: 58895 - DNA, 21 bp, Homo Sapiens
agcgcattggacttctaattc

SEQ ID NO: 58896 - DNA, 48 bp, Homo Sapiens; identical to SEQ ID NO: 8079

SEQ ID NO: 58897 - DNA, 29 bp, Homo Sapiens
cagttgacccgggttcgattcccggccaa

SEQ ID NO: 58898 - DNA, 36 bp, Homo Sapiens; identical to SEQ ID NO: 9686

SEQ ID NO: 58899 - DNA, 22 bp, Homo Sapiens
ttcgaatccggctcggaggacc

SEQ ID NO: 58900 - DNA, 17 bp, Homo Sapiens
agactttttctctgacc

SEQ ID NO: 58901 - DNA, 20 bp, Homo Sapiens
ggccggttagctcagttggt

SEQ ID NO: 58902 - DNA, 26 bp, Homo Sapiens
gtttccgtagtgtagtggttatcacg

SEQ ID NO: 58903 - DNA, 24 bp, Homo Sapiens
tcaacttaacttgaccgctctgac

SEQ ID NO: 58904 - DNA, 20 bp, Homo Sapiens
gctccgaggtgattttcata

SEQ ID NO: 58905 - DNA, 25 bp, Homo Sapiens
gagtgaagcattggactgtaaatct

SEQ ID NO: 58906 - DNA, 22 bp, Homo Sapiens
gtggttgtagtccgtgcgagaa

SEQ ID NO: 58907 - DNA, 26 bp, Homo Sapiens
gagtgaagcattggactgtaaatcta

SEQ ID NO: 58908 - DNA, 29 bp, Homo Sapiens
cggatagctcagtcggtagagcatcagac

SEQ ID NO: 58909 - DNA, 20 bp, Homo Sapiens
gcggttatcacgtctgcttt

SEQ ID NO: 58910 - DNA, 20 bp, Homo Sapiens
gtagtccgtgcgagaatacc

SEQ ID NO: 58911 - DNA, 23 bp, Homo Sapiens
gttcgaatccggctcgaaggacc

SEQ ID NO: 58912 - DNA, 17 bp, Homo Sapiens
tgagtgaagcattggac

SEQ ID NO: 58913 - DNA, 23 bp, Homo Sapiens
gttcgattccccaacggggagcc

SEQ ID NO: 58914 - DNA, 37 bp, Homo Sapiens; identical to SEQ ID NO: 398

SEQ ID NO: 58915 - DNA, 36 bp, Homo Sapiens; identical to SEQ ID NO: 1009

SEQ ID NO: 58916 - DNA, 28 bp, Homo Sapiens
acgcgggagaccggggttcgattccccg

SEQ ID NO: 58917 - DNA, 48 bp, Homo Sapiens; identical to SEQ ID NO: 7580

SEQ ID NO: 58918 - DNA, 33 bp, Homo Sapiens; identical to SEQ ID NO: 8819

SEQ ID NO: 58919 - DNA, 33 bp, Homo Sapiens; identical to SEQ ID NO: 18716

SEQ ID NO: 58920 - DNA, 36 bp, Homo Sapiens; identical to SEQ ID NO: 20912

SEQ ID NO: 58921 - DNA, 26 bp, Homo Sapiens
tactttgatagagtaaataataggag

SEQ ID NO: 58922 - DNA, 33 bp, Homo Sapiens; identical to SEQ ID NO: 29376

SEQ ID NO: 58923 - DNA, 19 bp, Homo Sapiens
taaagactttttctctgac

SEQ ID NO: 58924 - DNA, 31 bp, Homo Sapiens; identical to SEQ ID NO: 11097

SEQ ID NO: 58925 - DNA, 20 bp, Homo Sapiens
gttaactaagtgtttgtggg

SEQ ID NO: 58926 - DNA, 23 bp, Homo Sapiens
gttcaattccccgacggggagcc

SEQ ID NO: 58927 - DNA, 38 bp, Homo Sapiens; identical to SEQ ID NO: 8373

SEQ ID NO: 58928 - DNA, 21 bp, Homo Sapiens
taacagctatccattggtctt

SEQ ID NO: 58929 - DNA, 20 bp, Homo Sapiens
caacattcaaaaaagagtac

SEQ ID NO: 58930 - DNA, 21 bp, Homo Sapiens
cagttgatgcagagtggggtt

SEQ ID NO: 58931 - DNA, 39 bp, Homo Sapiens; identical to SEQ ID NO: 1012

SEQ ID NO: 58932 - DNA, 38 bp, Homo Sapiens; identical to SEQ ID NO: 3226

SEQ ID NO: 58933 - DNA, 42 bp, Homo Sapiens; identical to SEQ ID NO: 3455

SEQ ID NO: 58934 - DNA, 21 bp, Homo Sapiens
tcgagtctcggtggaacctcc

SEQ ID NO: 58935 - DNA, 33 bp, Homo Sapiens; identical to SEQ ID NO: 4383

SEQ ID NO: 58936 - DNA, 26 bp, Homo Sapiens
aggtggcccgggttcgactcccggta

SEQ ID NO: 58937 - DNA, 33 bp, Homo Sapiens; identical to SEQ ID NO: 16879

SEQ ID NO: 58938 - DNA, 40 bp, Homo Sapiens; identical to SEQ ID NO: 20229

SEQ ID NO: 58939 - DNA, 38 bp, Homo Sapiens; identical to SEQ ID NO: 20914

SEQ ID NO: 58940 - DNA, 37 bp, Homo Sapiens; identical to SEQ ID NO: 26829

SEQ ID NO: 58941 - DNA, 18 bp, Homo Sapiens
atggttagcactctggac

SEQ ID NO: 58942 - DNA, 34 bp, Homo Sapiens; identical to SEQ ID NO: 16836

SEQ ID NO: 58943 - DNA, 27 bp, Homo Sapiens
tggtctagtggttaggattcggcgctc

SEQ ID NO: 58944 - DNA, 18 bp, Homo Sapiens
gaaagctcacaagaactg

SEQ ID NO: 58945 - DNA, 34 bp, Homo Sapiens; identical to SEQ ID NO: 24011

SEQ ID NO: 58946 - DNA, 34 bp, Homo Sapiens; identical to SEQ ID NO: 19921

SEQ ID NO: 58947 - DNA, 44 bp, Homo Sapiens; identical to SEQ ID NO: 14159

SEQ ID NO: 58948 - DNA, 16 bp, Homo Sapiens
gttaaagactttttct

SEQ ID NO: 58949 - DNA, 34 bp, Homo Sapiens; identical to SEQ ID NO: 4435

SEQ ID NO: 58950 - DNA, 37 bp, Homo Sapiens; identical to SEQ ID NO: 5442

SEQ ID NO: 58951 - DNA, 25 bp, Homo Sapiens
gtgtaatggttagcactctggactc

SEQ ID NO: 58952 - DNA, 20 bp, Homo Sapiens
agtaaggtcagctaaataag

SEQ ID NO: 58953 - DNA, 19 bp, Homo Sapiens
gggttttgcagtccttacc

SEQ ID NO: 58954 - DNA, 24 bp, Homo Sapiens
agctcagtcggtagagcatcagac

SEQ ID NO: 58955 - DNA, 23 bp, Homo Sapiens
caagaactgctaactcatgcccc

SEQ ID NO: 58956 - DNA, 28 bp, Homo Sapiens
acatggtctagcggttaggattcctggt

SEQ ID NO: 58957 - DNA, 17 bp, Homo Sapiens
gagtgaagcattggact

SEQ ID NO: 58958 - DNA, 21 bp, Homo Sapiens
gtagtggttatcacgtctgct

SEQ ID NO: 58959 - DNA, 40 bp, Homo Sapiens; identical to SEQ ID NO: 27170

SEQ ID NO: 58960 - DNA, 31 bp, Homo Sapiens; identical to SEQ ID NO: 17800

SEQ ID NO: 58961 - DNA, 47 bp, Homo Sapiens; identical to SEQ ID NO: 17151

SEQ ID NO: 58962 - DNA, 25 bp, Homo Sapiens
ctcagtcggtagagcatcagacttt

SEQ ID NO: 58963 - DNA, 24 bp, Homo Sapiens
gagttcaaatctcgctggggcctc

SEQ ID NO: 58964 - DNA, 31 bp, Homo Sapiens; identical to SEQ ID NO: 4348

SEQ ID NO: 58965 - DNA, 43 bp, Homo Sapiens; identical to SEQ ID NO: 7621

SEQ ID NO: 58966 - DNA, 29 bp, Homo Sapiens
cccaggcggcccgggttcgactcccggtg

SEQ ID NO: 58967 - DNA, 38 bp, Homo Sapiens; identical to SEQ ID NO: 16176

SEQ ID NO: 58968 - DNA, 18 bp, Homo Sapiens
gtcaggatggccgagcgg

SEQ ID NO: 58969 - DNA, 30 bp, Homo Sapiens; identical to SEQ ID NO: 6404

SEQ ID NO: 58970 - DNA, 28 bp, Homo Sapiens
tgatcgtatagtggttagtactctgcgt

SEQ ID NO: 58971 - DNA, 20 bp, Homo Sapiens
ggtcgtggttgtagtccgtg

SEQ ID NO: 58972 - DNA, 23 bp, Homo Sapiens
gtggttgtagtccgtgcgagaat

SEQ ID NO: 58973 - DNA, 23 bp, Homo Sapiens
gggggtatagctcagtggtagag

SEQ ID NO: 58974 - DNA, 28 bp, Homo Sapiens
gtggtctagtggttaggattcggcgctc

SEQ ID NO: 58975 - DNA, 24 bp, Homo Sapiens
ggttcgaatcccaccgctgccacc

SEQ ID NO: 58976 - DNA, 22 bp, Homo Sapiens
acaaaacgaatgatttcgactc

SEQ ID NO: 58977 - DNA, 16 bp, Homo Sapiens
agtgaagcattggact

SEQ ID NO: 58978 - DNA, 47 bp, Homo Sapiens; identical to SEQ ID NO: 1114

SEQ ID NO: 58979 - DNA, 41 bp, Homo Sapiens; identical to SEQ ID NO: 22706

SEQ ID NO: 58980 - DNA, 22 bp, Homo Sapiens
ggtagcgtggccgagtggtcta

SEQ ID NO: 58981 - DNA, 17 bp, Homo Sapiens
ggtagcgtggccgagcg

SEQ ID NO: 58982 - DNA, 22 bp, Homo Sapiens
gttaggattcggcgctctcacc

SEQ ID NO: 58983 - DNA, 47 bp, Homo Sapiens; identical to SEQ ID NO: 977

SEQ ID NO: 58984 - DNA, 37 bp, Homo Sapiens; identical to SEQ ID NO: 9433

SEQ ID NO: 58985 - DNA, 31 bp, Homo Sapiens; identical to SEQ ID NO: 13601

SEQ ID NO: 58986 - DNA, 31 bp, Homo Sapiens; identical to SEQ ID NO: 17725

SEQ ID NO: 58987 - DNA, 25 bp, Homo Sapiens
gtggtagaattctcgcctgccacgc

SEQ ID NO: 58988 - DNA, 26 bp, Homo Sapiens
taaaccaggggtcgcgagttcaaatc

SEQ ID NO: 58989 - DNA, 28 bp, Homo Sapiens
tccagggttcaagtccctgttcaggcgc

SEQ ID NO: 58990 - DNA, 22 bp, Homo Sapiens
agttaaagactttttctctgac

SEQ ID NO: 58991 - DNA, 25 bp, Homo Sapiens
ggtagcgtggccgagtggtctaagg

SEQ ID NO: 58992 - DNA, 32 bp, Homo Sapiens; identical to SEQ ID NO: 21797

SEQ ID NO: 58993 - DNA, 36 bp, Homo Sapiens; identical to SEQ ID NO: 10599

SEQ ID NO: 58994 - DNA, 30 bp, Homo Sapiens; identical to SEQ ID NO: 31052

SEQ ID NO: 58995 - DNA, 41 bp, Homo Sapiens; identical to SEQ ID NO: 28911

SEQ ID NO: 58996 - DNA, 22 bp, Homo Sapiens
gactcaagttctggtctccgga

SEQ ID NO: 58997 - DNA, 27 bp, Homo Sapiens
cgctctcaccgccgcggcccgggttcg

SEQ ID NO: 58998 - DNA, 30 bp, Homo Sapiens; identical to SEQ ID NO: 15331

SEQ ID NO: 58999 - DNA, 48 bp, Homo Sapiens; identical to SEQ ID NO: 1630

SEQ ID NO: 59000 - DNA, 32 bp, Homo Sapiens; identical to SEQ ID NO: 4659

SEQ ID NO: 59001 - DNA, 46 bp, Homo Sapiens; identical to SEQ ID NO: 4928

SEQ ID NO: 59002 - DNA, 38 bp, Homo Sapiens; identical to SEQ ID NO: 9196

SEQ ID NO: 59003 - DNA, 31 bp, Homo Sapiens; identical to SEQ ID NO: 10266

SEQ ID NO: 59004 - DNA, 33 bp, Homo Sapiens; identical to SEQ ID NO: 10496

SEQ ID NO: 59005 - DNA, 32 bp, Homo Sapiens; identical to SEQ ID NO: 12597

SEQ ID NO: 59006 - DNA, 43 bp, Homo Sapiens; identical to SEQ ID NO: 17586

SEQ ID NO: 59007 - DNA, 33 bp, Homo Sapiens; identical to SEQ ID NO: 20206

SEQ ID NO: 59008 - DNA, 33 bp, Homo Sapiens; identical to SEQ ID NO: 21754

SEQ ID NO: 59009 - DNA, 27 bp, Homo Sapiens
tagtggttatcacgttcgcctcacacg

SEQ ID NO: 59010 - DNA, 18 bp, Homo Sapiens
gtggttagtactctgcgt

SEQ ID NO: 59011 - DNA, 21 bp, Homo Sapiens
tggtcgtggttgtagtccgtg

SEQ ID NO: 59012 - DNA, 23 bp, Homo Sapiens
gtatagtggttagtactctgcgt

SEQ ID NO: 59013 - DNA, 32 bp, Homo Sapiens; identical to SEQ ID NO: 25532

SEQ ID NO: 59014 - DNA, 20 bp, Homo Sapiens
catgggtggttcagtggtag

SEQ ID NO: 59015 - DNA, 34 bp, Homo Sapiens; identical to SEQ ID NO: 17431

SEQ ID NO: 59016 - DNA, 30 bp, Homo Sapiens; identical to SEQ ID NO: 130

SEQ ID NO: 59017 - DNA, 30 bp, Homo Sapiens; identical to SEQ ID NO: 28883

SEQ ID NO: 59018 - DNA, 26 bp, Homo Sapiens
ccgaaaatgttggttatacccttccc

SEQ ID NO: 59019 - DNA, 35 bp, Homo Sapiens; identical to SEQ ID NO: 29265

SEQ ID NO: 59020 - DNA, 17 bp, Homo Sapiens
gcagcaacctcggttcg

SEQ ID NO: 59021 - DNA, 22 bp, Homo Sapiens
tcaattcccggccaatgcacca

SEQ ID NO: 59022 - DNA, 37 bp, Homo Sapiens; identical to SEQ ID NO: 3225

SEQ ID NO: 59023 - DNA, 35 bp, Homo Sapiens; identical to SEQ ID NO: 4436

SEQ ID NO: 59024 - DNA, 26 bp, Homo Sapiens
gcccccatgtctaacaacatggcttt

SEQ ID NO: 59025 - DNA, 24 bp, Homo Sapiens
acaacagaggcttacgacccctta

SEQ ID NO: 59026 - DNA, 48 bp, Homo Sapiens; identical to SEQ ID NO: 6769

SEQ ID NO: 59027 - DNA, 26 bp, Homo Sapiens
catatgtccgcgtgggttcgaacccc

SEQ ID NO: 59028 - DNA, 35 bp, Homo Sapiens; identical to SEQ ID NO: 14393

SEQ ID NO: 59029 - DNA, 44 bp, Homo Sapiens; identical to SEQ ID NO: 17121

SEQ ID NO: 59030 - DNA, 25 bp, Homo Sapiens
ggagttaaagactttttctctgacc

SEQ ID NO: 59031 - DNA, 18 bp, Homo Sapiens
agtgaagcattggactgt

SEQ ID NO: 59032 - DNA, 22 bp, Homo Sapiens
tagtggttaggattcggcgctc

SEQ ID NO: 59033 - DNA, 28 bp, Homo Sapiens
aaaatggctgagtgaagcattggactgt

SEQ ID NO: 59034 - DNA, 17 bp, Homo Sapiens
tcctatatatcttacca

SEQ ID NO: 59035 - DNA, 32 bp, Homo Sapiens; identical to SEQ ID NO: 20185

SEQ ID NO: 59036 - DNA, 22 bp, Homo Sapiens
cgtggttgtagtccgtgcgaga

SEQ ID NO: 59037 - DNA, 29 bp, Homo Sapiens
gacaggggttaggcctctttttaccacca

SEQ ID NO: 59038 - DNA, 19 bp, Homo Sapiens
taggcctctttttaccacc

SEQ ID NO: 59039 - DNA, 25 bp, Homo Sapiens
acagctatccattggtcttaggccc

SEQ ID NO: 59040 - DNA, 21 bp, Homo Sapiens
ttctgtagtgtagtggttatc

SEQ ID NO: 59041 - DNA, 41 bp, Homo Sapiens; identical to SEQ ID NO: 23366

SEQ ID NO: 59042 - DNA, 43 bp, Homo Sapiens; identical to SEQ ID NO: 19903

SEQ ID NO: 59043 - DNA, 20 bp, Homo Sapiens
ggatggccgagtggtctaag

SEQ ID NO: 59044 - DNA, 23 bp, Homo Sapiens
tctcagggatgggttcgattctc

SEQ ID NO: 59045 - DNA, 31 bp, Homo Sapiens; identical to SEQ ID NO: 1153

SEQ ID NO: 59046 - DNA, 39 bp, Homo Sapiens; identical to SEQ ID NO: 6035

SEQ ID NO: 59047 - DNA, 36 bp, Homo Sapiens; identical to SEQ ID NO: 6784

SEQ ID NO: 59048 - DNA, 32 bp, Homo Sapiens; identical to SEQ ID NO: 9799

SEQ ID NO: 59049 - DNA, 34 bp, Homo Sapiens; identical to SEQ ID NO: 10672

SEQ ID NO: 59050 - DNA, 45 bp, Homo Sapiens; identical to SEQ ID NO: 21545

SEQ ID NO: 59051 - DNA, 20 bp, Homo Sapiens
gtctctgtggcgcaatcggt

SEQ ID NO: 59052 - DNA, 22 bp, Homo Sapiens
ctgtcacgcgggagaccggggt

SEQ ID NO: 59053 - DNA, 23 bp, Homo Sapiens
gttcgattccccgacggggagcc

SEQ ID NO: 59054 - DNA, 18 bp, Homo Sapiens
ggttttgcagtccttacc

SEQ ID NO: 59055 - DNA, 36 bp, Homo Sapiens; identical to SEQ ID NO: 21176

SEQ ID NO: 59056 - DNA, 35 bp, Homo Sapiens; identical to SEQ ID NO: 20368

SEQ ID NO: 59057 - DNA, 16 bp, Homo Sapiens
atccggctcggaggac

SEQ ID NO: 59058 - DNA, 30 bp, Homo Sapiens; identical to SEQ ID NO: 26928

SEQ ID NO: 59059 - DNA, 28 bp, Homo Sapiens
agtaagttgcaatacttaatttctgcca

SEQ ID NO: 59060 - DNA, 18 bp, Homo Sapiens
cgatcccgggtttcggca

SEQ ID NO: 59061 - DNA, 23 bp, Homo Sapiens
gttcgattcccggccaacgcacc

SEQ ID NO: 59062 - DNA, 28 bp, Homo Sapiens
gcccccatgtctaacaacatggctttct

SEQ ID NO: 59063 - DNA, 46 bp, Homo Sapiens; identical to SEQ ID NO: 21734

SEQ ID NO: 59064 - DNA, 30 bp, Homo Sapiens; identical to SEQ ID NO: 8396

SEQ ID NO: 59065 - DNA, 21 bp, Homo Sapiens
actcaagttctggtctccgga

SEQ ID NO: 59066 - DNA, 26 bp, Homo Sapiens
gagatgaaaacctttttccaaggaca

SEQ ID NO: 59067 - DNA, 17 bp, Homo Sapiens
gtcccatctgggtcgcc

SEQ ID NO: 59068 - DNA, 21 bp, Homo Sapiens
gtggtagagcgcatgctttgc

SEQ ID NO: 59069 - DNA, 34 bp, Homo Sapiens; identical to SEQ ID NO: 12250

SEQ ID NO: 59070 - DNA, 37 bp, Homo Sapiens; identical to SEQ ID NO: 13652

SEQ ID NO: 59071 - DNA, 24 bp, Homo Sapiens
aacagaggcttacgaccccttatt

SEQ ID NO: 59072 - DNA, 38 bp, Homo Sapiens; identical to SEQ ID NO: 3115

SEQ ID NO: 59073 - DNA, 31 bp, Homo Sapiens; identical to SEQ ID NO: 3920

SEQ ID NO: 59074 - DNA, 31 bp, Homo Sapiens; identical to SEQ ID NO: 8938

SEQ ID NO: 59075 - DNA, 44 bp, Homo Sapiens; identical to SEQ ID NO: 10204

SEQ ID NO: 59076 - DNA, 30 bp, Homo Sapiens; identical to SEQ ID NO: 10503

SEQ ID NO: 59077 - DNA, 31 bp, Homo Sapiens; identical to SEQ ID NO: 10815

SEQ ID NO: 59078 - DNA, 39 bp, Homo Sapiens; identical to SEQ ID NO: 11188

SEQ ID NO: 59079 - DNA, 23 bp, Homo Sapiens
cctcctcaaagcaatacactgaa

SEQ ID NO: 59080 - DNA, 48 bp, Homo Sapiens; identical to SEQ ID NO: 11606

SEQ ID NO: 59081 - DNA, 32 bp, Homo Sapiens; identical to SEQ ID NO: 16878

SEQ ID NO: 59082 - DNA, 34 bp, Homo Sapiens; identical to SEQ ID NO: 18767

SEQ ID NO: 59083 - DNA, 37 bp, Homo Sapiens; identical to SEQ ID NO: 22497

SEQ ID NO: 59084 - DNA, 19 bp, Homo Sapiens
taagctatcgggcccatac

SEQ ID NO: 59085 - DNA, 34 bp, Homo Sapiens; identical to SEQ ID NO: 23712

SEQ ID NO: 59086 - DNA, 22 bp, Homo Sapiens
aacttaacttgaccgctctgac

SEQ ID NO: 59087 - DNA, 20 bp, Homo Sapiens
taatggttagcactctggac

SEQ ID NO: 59088 - DNA, 22 bp, Homo Sapiens
aacatcagattgtgaatctgac

SEQ ID NO: 59089 - DNA, 28 bp, Homo Sapiens
atcattggtcgtggttgtagtccgtgcg

SEQ ID NO: 59090 - DNA, 16 bp, Homo Sapiens
gtgtgaggtcccgggt

SEQ ID NO: 59091 - DNA, 23 bp, Homo Sapiens
agaactgctaactcatgccccca

SEQ ID NO: 59092 - DNA, 21 bp, Homo Sapiens
gcttcaaacctgccggggctt

SEQ ID NO: 59093 - DNA, 23 bp, Homo Sapiens
ggtaaaatggctgagtgaagcat

SEQ ID NO: 59094 - DNA, 20 bp, Homo Sapiens
ccgaaaatgttggttatacc

SEQ ID NO: 59095 - DNA, 23 bp, Homo Sapiens
agttgcaatacttaatttctgcc

SEQ ID NO: 59096 - DNA, 22 bp, Homo Sapiens
ttcgattccggctcgaaggacc

SEQ ID NO: 59097 - DNA, 25 bp, Homo Sapiens
ggagcttaaacccccttatttctac

SEQ ID NO: 59098 - DNA, 22 bp, Homo Sapiens
gttcgatcccgggtttcggcac

SEQ ID NO: 59099 - DNA, 18 bp, Homo Sapiens
tggtgagtatccccgcct

SEQ ID NO: 59100 - DNA, 42 bp, Homo Sapiens; identical to SEQ ID NO: 22550

SEQ ID NO: 59101 - DNA, 21 bp, Homo Sapiens
gaaaacctttttccaaggaca

SEQ ID NO: 59102 - DNA, 31 bp, Homo Sapiens; identical to SEQ ID NO: 3156

SEQ ID NO: 59103 - DNA, 26 bp, Homo Sapiens
cagttgatgcagagtggggttttgca

SEQ ID NO: 59104 - DNA, 23 bp, Homo Sapiens
gagttaaagactttttctctgac

SEQ ID NO: 59105 - DNA, 35 bp, Homo Sapiens; identical to SEQ ID NO: 1481

SEQ ID NO: 59106 - DNA, 31 bp, Homo Sapiens; identical to SEQ ID NO: 2705

SEQ ID NO: 59107 - DNA, 31 bp, Homo Sapiens; identical to SEQ ID NO: 4260

SEQ ID NO: 59108 - DNA, 17 bp, Homo Sapiens
ctggttcgattccggct

SEQ ID NO: 59109 - DNA, 35 bp, Homo Sapiens; identical to SEQ ID NO: 16405

SEQ ID NO: 59110 - DNA, 35 bp, Homo Sapiens; identical to SEQ ID NO: 16692

SEQ ID NO: 59111 - DNA, 34 bp, Homo Sapiens; identical to SEQ ID NO: 16880

SEQ ID NO: 59112 - DNA, 24 bp, Homo Sapiens
tcagattgtgaatctgacaacaga

SEQ ID NO: 59113 - DNA, 40 bp, Homo Sapiens; identical to SEQ ID NO: 25685

SEQ ID NO: 59114 - DNA, 17 bp, Homo Sapiens
ttcccggccagggaacc

SEQ ID NO: 59115 - DNA, 17 bp, Homo Sapiens
aagactttttctctgac

SEQ ID NO: 59116 - DNA, 29 bp, Homo Sapiens
ccatggtgtaatggttagcactctggact

SEQ ID NO: 59117 - DNA, 30 bp, Homo Sapiens; identical to SEQ ID NO: 25831

SEQ ID NO: 59118 - DNA, 36 bp, Homo Sapiens; identical to SEQ ID NO: 21757

SEQ ID NO: 59119 - DNA, 36 bp, Homo Sapiens; identical to SEQ ID NO: 3484

SEQ ID NO: 59120 - DNA, 17 bp, Homo Sapiens
cccagtggcctaatgga

SEQ ID NO: 59121 - DNA, 19 bp, Homo Sapiens
aacccccttatttctacca

SEQ ID NO: 59122 - DNA, 24 bp, Homo Sapiens
gacaacattcaaaaaagagtacca

SEQ ID NO: 59123 - DNA, 27 bp, Homo Sapiens
gctgagtgaagcattggactgtaaatc

SEQ ID NO: 59124 - DNA, 18 bp, Homo Sapiens
aacacctctttacagtga

SEQ ID NO: 59125 - DNA, 26 bp, Homo Sapiens
cagagtggggttttgcagtccttacc

SEQ ID NO: 59126 - DNA, 24 bp, Homo Sapiens
accaaaacatcagattgtgaatct

SEQ ID NO: 59127 - DNA, 22 bp, Homo Sapiens
ttaggagatttcaacttaactt

SEQ ID NO: 59128 - DNA, 20 bp, Homo Sapiens
tcaaatctcggtgggacctc

SEQ ID NO: 59129 - DNA, 16 bp, Homo Sapiens
ttttgcagtccttacc

SEQ ID NO: 59130 - DNA, 34 bp, Homo Sapiens; identical to SEQ ID NO: 4780

SEQ ID NO: 59131 - DNA, 48 bp, Homo Sapiens; identical to SEQ ID NO: 13308

SEQ ID NO: 59132 - DNA, 45 bp, Homo Sapiens; identical to SEQ ID NO: 16995

SEQ ID NO: 59133 - DNA, 48 bp, Homo Sapiens; identical to SEQ ID NO: 18364

SEQ ID NO: 59134 - DNA, 35 bp, Homo Sapiens; identical to SEQ ID NO: 18413

SEQ ID NO: 59135 - DNA, 48 bp, Homo Sapiens; identical to SEQ ID NO: 25718

SEQ ID NO: 59136 - DNA, 20 bp, Homo Sapiens
tcgaaaccgggcagaagcac

SEQ ID NO: 59137 - DNA, 16 bp, Homo Sapiens
tcttaatcccagggtc

SEQ ID NO: 59138 - DNA, 34 bp, Homo Sapiens; identical to SEQ ID NO: 27243

SEQ ID NO: 59139 - DNA, 22 bp, Homo Sapiens
tatagtggttagtactctgcgt

SEQ ID NO: 59140 - DNA, 23 bp, Homo Sapiens
gcttaaacccccttatttctacc

SEQ ID NO: 59141 - DNA, 22 bp, Homo Sapiens
tagtactctgcgttgtggccgc

SEQ ID NO: 59142 - DNA, 25 bp, Homo Sapiens
gtctaacaacatggctttctcacca

SEQ ID NO: 59143 - DNA, 27 bp, Homo Sapiens
gcataggtggttcagtggtagaattct

SEQ ID NO: 59144 - DNA, 34 bp, Homo Sapiens; identical to SEQ ID NO: 16563

SEQ ID NO: 59145 - DNA, 37 bp, Homo Sapiens; identical to SEQ ID NO: 3485

SEQ ID NO: 59146 - DNA, 25 bp, Homo Sapiens
ggagaccggggttcgattccccgac

SEQ ID NO: 59147 - DNA, 19 bp, Homo Sapiens
gttcgattcccggccaatg

SEQ ID NO: 59148 - DNA, 19 bp, Homo Sapiens
agcacccaacttacactta

SEQ ID NO: 59149 - DNA, 16 bp, Homo Sapiens
tccttccttttttgcc

SEQ ID NO: 59150 - DNA, 41 bp, Homo Sapiens; identical to SEQ ID NO: 13160

SEQ ID NO: 59151 - DNA, 21 bp, Homo Sapiens
acagaggcttacgacccctta

SEQ ID NO: 59152 - DNA, 21 bp, Homo Sapiens
gcggcccgggttcgattcccg

SEQ ID NO: 59153 - DNA, 48 bp, Homo Sapiens; identical to SEQ ID NO: 2740

SEQ ID NO: 59154 - DNA, 36 bp, Homo Sapiens; identical to SEQ ID NO: 4716

SEQ ID NO: 59155 - DNA, 34 bp, Homo Sapiens; identical to SEQ ID NO: 6230

SEQ ID NO: 59156 - DNA, 36 bp, Homo Sapiens; identical to SEQ ID NO: 6797

SEQ ID NO: 59157 - DNA, 30 bp, Homo Sapiens; identical to SEQ ID NO: 9228

SEQ ID NO: 59158 - DNA, 37 bp, Homo Sapiens; identical to SEQ ID NO: 13206

SEQ ID NO: 59159 - DNA, 31 bp, Homo Sapiens; identical to SEQ ID NO: 15255

SEQ ID NO: 59160 - DNA, 42 bp, Homo Sapiens; identical to SEQ ID NO: 26330

SEQ ID NO: 59161 - DNA, 34 bp, Homo Sapiens; identical to SEQ ID NO: 26407

SEQ ID NO: 59162 - DNA, 32 bp, Homo Sapiens; identical to SEQ ID NO: 30424

SEQ ID NO: 59163 - DNA, 38 bp, Homo Sapiens; identical to SEQ ID NO: 31188

SEQ ID NO: 59164 - DNA, 24 bp, Homo Sapiens
gcgttggtggtatagtggtgagca

SEQ ID NO: 59165 - DNA, 18 bp, Homo Sapiens
aaagactttttctctgac

SEQ ID NO: 59166 - DNA, 20 bp, Homo Sapiens
gggggtgtagctcagtggta

SEQ ID NO: 59167 - DNA, 22 bp, Homo Sapiens
gacctcgtggcgcaatggtagc

SEQ ID NO: 59168 - DNA, 27 bp, Homo Sapiens
ggtggagttaaagactttttctctgac

SEQ ID NO: 59169 - DNA, 18 bp, Homo Sapiens
gcttctgtagtgtagtgg

SEQ ID NO: 59170 - DNA, 27 bp, Homo Sapiens
ggtcgtggttgtagtccgtgcgagaat

SEQ ID NO: 59171 - DNA, 32 bp, Homo Sapiens; identical to SEQ ID NO: 6210

SEQ ID NO: 59172 - DNA, 17 bp, Homo Sapiens
cagttgacccgggttcg

SEQ ID NO: 59173 - DNA, 32 bp, Homo Sapiens; identical to SEQ ID NO: 19933

SEQ ID NO: 59174 - DNA, 23 bp, Homo Sapiens
cagtcggtagagcatcagacttt

SEQ ID NO: 59175 - DNA, 24 bp, Homo Sapiens
ggttcaattccccgacggggagcc

SEQ ID NO: 59176 - DNA, 25 bp, Homo Sapiens
ggttagcactctggactttgaatcc

SEQ ID NO: 59177 - DNA, 19 bp, Homo Sapiens
ggttaggcctctttttacc

SEQ ID NO: 59178 - DNA, 19 bp, Homo Sapiens
tcaaatcccggacgagccc

SEQ ID NO: 59179 - DNA, 30 bp, Homo Sapiens; identical to SEQ ID NO: 26847

SEQ ID NO: 59180 - DNA, 36 bp, Homo Sapiens; identical to SEQ ID NO: 16833

SEQ ID NO: 59181 - DNA, 30 bp, Homo Sapiens; identical to SEQ ID NO: 13061

SEQ ID NO: 59182 - DNA, 28 bp, Homo Sapiens
gagatgaaaacctttttccaaggacacc

SEQ ID NO: 59183 - DNA, 24 bp, Homo Sapiens
aagttgcaatacttaatttctgcc

SEQ ID NO: 59184 - DNA, 16 bp, Homo Sapiens
aatacagaccaagagc

SEQ ID NO: 59185 - DNA, 29 bp, Homo Sapiens
agattaagagaaccaacacctctttacag

SEQ ID NO: 59186 - DNA, 26 bp, Homo Sapiens
gctctcaccgccgcggcccgggttcg

SEQ ID NO: 59187 - DNA, 28 bp, Homo Sapiens
gtgagcactctggactctgaatccagcg

SEQ ID NO: 59188 - DNA, 32 bp, Homo Sapiens; identical to SEQ ID NO: 206

SEQ ID NO: 59189 - DNA, 27 bp, Homo Sapiens
agaggcttacgaccccttatttacccc

SEQ ID NO: 59190 - DNA, 29 bp, Homo Sapiens
ccatagtgtagtggttatcacgtctgctt

SEQ ID NO: 59191 - DNA, 28 bp, Homo Sapiens
ctagctcagtcggtagagcatgagactc

SEQ ID NO: 59192 - DNA, 17 bp, Homo Sapiens
ggttcgatcccgggttt

SEQ ID NO: 59193 - DNA, 27 bp, Homo Sapiens
taaattagaatcttagctttgggtgct

SEQ ID NO: 59194 - DNA, 40 bp, Homo Sapiens; identical to SEQ ID NO: 23028

SEQ ID NO: 59195 - DNA, 21 bp, Homo Sapiens
gacgaggtggccgagtggtta

SEQ ID NO: 59196 - DNA, 16 bp, Homo Sapiens
aaatgttggttatacc

SEQ ID NO: 59197 - DNA, 37 bp, Homo Sapiens; identical to SEQ ID NO: 2311

SEQ ID NO: 59198 - DNA, 24 bp, Homo Sapiens
cccattcttgcgacccgggttcga

SEQ ID NO: 59199 - DNA, 28 bp, Homo Sapiens
cgtgggttcgaatcccaccctcgtcgcc

SEQ ID NO: 59200 - DNA, 31 bp, Homo Sapiens; identical to SEQ ID NO: 14000

SEQ ID NO: 59201 - DNA, 18 bp, Homo Sapiens
gtcccggcagagatgcca

SEQ ID NO: 59202 - DNA, 33 bp, Homo Sapiens; identical to SEQ ID NO: 23909

SEQ ID NO: 59203 - DNA, 35 bp, Homo Sapiens; identical to SEQ ID NO: 27074

SEQ ID NO: 59204 - DNA, 23 bp, Homo Sapiens
tatcattggtcgtggttgtagtc

SEQ ID NO: 59205 - DNA, 16 bp, Homo Sapiens
ggttagtactctgcgt

SEQ ID NO: 59206 - DNA, 21 bp, Homo Sapiens
gtaatggttagcactctggac

SEQ ID NO: 59207 - DNA, 20 bp, Homo Sapiens
atggtgagcactctggactc

SEQ ID NO: 59208 - DNA, 25 bp, Homo Sapiens
atttcaacttaacttgaccgctctg

SEQ ID NO: 59209 - DNA, 21 bp, Homo Sapiens
gttaggcctctttttaccacc

SEQ ID NO: 59210 - DNA, 18 bp, Homo Sapiens
ctaggggtatgattctcg

SEQ ID NO: 59211 - DNA, 17 bp, Homo Sapiens
gttcgactcccggtgtg

SEQ ID NO: 59212 - DNA, 20 bp, Homo Sapiens
tcttaatcccagggtcgtgg

SEQ ID NO: 59213 - DNA, 20 bp, Homo Sapiens
aaagacaggggttaggcctc

SEQ ID NO: 59214 - DNA, 35 bp, Homo Sapiens; identical to SEQ ID NO: 27659

SEQ ID NO: 59215 - DNA, 18 bp, Homo Sapiens
tctcttcgggggcgtggg

SEQ ID NO: 59216 - DNA, 37 bp, Homo Sapiens; identical to SEQ ID NO: 24955

SEQ ID NO: 59217 - DNA, 16 bp, Homo Sapiens
atggataaggcactgg

SEQ ID NO: 59218 - DNA, 35 bp, Homo Sapiens; identical to SEQ ID NO: 8271

SEQ ID NO: 59219 - DNA, 21 bp, Homo Sapiens
tggggttttgcagtccttacc

SEQ ID NO: 59220 - DNA, 32 bp, Homo Sapiens; identical to SEQ ID NO: 12093

SEQ ID NO: 59221 - DNA, 24 bp, Homo Sapiens
gtttccgtagtgtagtggtcatca

SEQ ID NO: 59222 - DNA, 17 bp, Homo Sapiens
gtagtcgtggccgagtg

SEQ ID NO: 59223 - DNA, 33 bp, Homo Sapiens; identical to SEQ ID NO: 3077

SEQ ID NO: 59224 - DNA, 30 bp, Homo Sapiens; identical to SEQ ID NO: 3839

SEQ ID NO: 59225 - DNA, 35 bp, Homo Sapiens; identical to SEQ ID NO: 8926

SEQ ID NO: 59226 - DNA, 44 bp, Homo Sapiens; identical to SEQ ID NO: 13369

SEQ ID NO: 59227 - DNA, 41 bp, Homo Sapiens; identical to SEQ ID NO: 14374

SEQ ID NO: 59228 - DNA, 32 bp, Homo Sapiens; identical to SEQ ID NO: 17569

SEQ ID NO: 59229 - DNA, 48 bp, Homo Sapiens; identical to SEQ ID NO: 22254

SEQ ID NO: 59230 - DNA, 25 bp, Homo Sapiens
tggctaggattcggcgctttcaccg

SEQ ID NO: 59231 - DNA, 27 bp, Homo Sapiens
ttcgaagaagcagcttcaaacctgccg

SEQ ID NO: 59232 - DNA, 19 bp, Homo Sapiens
aaagactttttctctgacc

SEQ ID NO: 59233 - DNA, 30 bp, Homo Sapiens; identical to SEQ ID NO: 24007

SEQ ID NO: 59234 - DNA, 17 bp, Homo Sapiens
gtttccgtagtgtagtg

SEQ ID NO: 59235 - DNA, 29 bp, Homo Sapiens
gcccccatgtctaacaacatggctttctc

SEQ ID NO: 59236 - DNA, 23 bp, Homo Sapiens
cgtggttgtagtccgtgcgagaa

SEQ ID NO: 59237 - DNA, 28 bp, Homo Sapiens
gtcgtggttgtagtccgtgcgagaatac

SEQ ID NO: 59238 - DNA, 16 bp, Homo Sapiens
ttcgactcccggtatg

SEQ ID NO: 59239 - DNA, 35 bp, Homo Sapiens; identical to SEQ ID NO: 29170

SEQ ID NO: 59240 - DNA, 26 bp, Homo Sapiens
taagttgcaatacttaatttctgcca

SEQ ID NO: 59241 - DNA, 28 bp, Homo Sapiens
ggatagctcagtcggtagagcatcagac

SEQ ID NO: 59242 - DNA, 34 bp, Homo Sapiens; identical to SEQ ID NO: 19282

SEQ ID NO: 59243 - DNA, 25 bp, Homo Sapiens
aaagtcatggaggccatggggttgg

SEQ ID NO: 59244 - DNA, 27 bp, Homo Sapiens
aagaagcagcttcaaacctgccggggc

SEQ ID NO: 59245 - DNA, 35 bp, Homo Sapiens; identical to SEQ ID NO: 22225

SEQ ID NO: 59246 - DNA, 16 bp, Homo Sapiens
ctcagtcggtagagca

SEQ ID NO: 59247 - DNA, 23 bp, Homo Sapiens
gccacgcgggaggcccgggttcg

SEQ ID NO: 59248 - DNA, 26 bp, Homo Sapiens
cagattgtgaatctgacaacagaggc

SEQ ID NO: 59249 - DNA, 33 bp, Homo Sapiens; identical to SEQ ID NO: 29548

SEQ ID NO: 59250 - DNA, 35 bp, Homo Sapiens; identical to SEQ ID NO: 9807

SEQ ID NO: 59251 - DNA, 19 bp, Homo Sapiens
gattcccgggcggcgcacc

SEQ ID NO: 59252 - DNA, 17 bp, Homo Sapiens
atcacgtcggggtcacc

SEQ ID NO: 59253 - DNA, 17 bp, Homo Sapiens
ttcccgggcggcgcacc

SEQ ID NO: 59254 - DNA, 22 bp, Homo Sapiens
aaagacaggggttaggcctctt

SEQ ID NO: 59255 - DNA, 32 bp, Homo Sapiens; identical to SEQ ID NO: 1540

SEQ ID NO: 59256 - DNA, 31 bp, Homo Sapiens; identical to SEQ ID NO: 1853

SEQ ID NO: 59257 - DNA, 33 bp, Homo Sapiens; identical to SEQ ID NO: 2782

SEQ ID NO: 59258 - DNA, 35 bp, Homo Sapiens; identical to SEQ ID NO: 3924

SEQ ID NO: 59259 - DNA, 24 bp, Homo Sapiens
agcgtgctgggcccataacccaga

SEQ ID NO: 59260 - DNA, 47 bp, Homo Sapiens; identical to SEQ ID NO: 8235

SEQ ID NO: 59261 - DNA, 34 bp, Homo Sapiens; identical to SEQ ID NO: 8564

SEQ ID NO: 59262 - DNA, 24 bp, Homo Sapiens
cagtctcataatctgaaggtcgtg

SEQ ID NO: 59263 - DNA, 32 bp, Homo Sapiens; identical to SEQ ID NO: 10481

SEQ ID NO: 59264 - DNA, 42 bp, Homo Sapiens; identical to SEQ ID NO: 10751

SEQ ID NO: 59265 - DNA, 16 bp, Homo Sapiens
cgattcccggccaacg

SEQ ID NO: 59266 - DNA, 35 bp, Homo Sapiens; identical to SEQ ID NO: 13650

SEQ ID NO: 59267 - DNA, 34 bp, Homo Sapiens; identical to SEQ ID NO: 13705

SEQ ID NO: 59268 - DNA, 29 bp, Homo Sapiens
gctgggcccataacccagaggtcgatgga

SEQ ID NO: 59269 - DNA, 31 bp, Homo Sapiens; identical to SEQ ID NO: 18101

SEQ ID NO: 59270 - DNA, 33 bp, Homo Sapiens; identical to SEQ ID NO: 19195

SEQ ID NO: 59271 - DNA, 33 bp, Homo Sapiens; identical to SEQ ID NO: 20408

SEQ ID NO: 59272 - DNA, 17 bp, Homo Sapiens
gtcaggatggccgagca

SEQ ID NO: 59273 - DNA, 32 bp, Homo Sapiens; identical to SEQ ID NO: 21185

SEQ ID NO: 59274 - DNA, 42 bp, Homo Sapiens; identical to SEQ ID NO: 25542

SEQ ID NO: 59275 - DNA, 30 bp, Homo Sapiens; identical to SEQ ID NO: 26320

SEQ ID NO: 59276 - DNA, 29 bp, Homo Sapiens
tcttaatctcagggtcgtgggttcgagcc

SEQ ID NO: 59277 - DNA, 33 bp, Homo Sapiens; identical to SEQ ID NO: 29168

SEQ ID NO: 59278 - DNA, 19 bp, Homo Sapiens
gacccagtggcctaatgga

SEQ ID NO: 59279 - DNA, 20 bp, Homo Sapiens
gcgccgctggtgtagtggta

SEQ ID NO: 59280 - DNA, 22 bp, Homo Sapiens
tgagtgaagcattggactgtaa

SEQ ID NO: 59281 - DNA, 27 bp, Homo Sapiens
gtggagttaaagactttttctctgacc

SEQ ID NO: 59282 - DNA, 27 bp, Homo Sapiens
aaatggctgagtgaagcattggactgt

SEQ ID NO: 59283 - DNA, 24 bp, Homo Sapiens
ataacagctatccattggtcttag

SEQ ID NO: 59284 - DNA, 32 bp, Homo Sapiens; identical to SEQ ID NO: 16804

SEQ ID NO: 59285 - DNA, 33 bp, Homo Sapiens; identical to SEQ ID NO: 25533

SEQ ID NO: 59286 - DNA, 30 bp, Homo Sapiens; identical to SEQ ID NO: 7979

SEQ ID NO: 59287 - DNA, 36 bp, Homo Sapiens; identical to SEQ ID NO: 19548

SEQ ID NO: 59288 - DNA, 17 bp, Homo Sapiens
tatgattctcggtttgg

SEQ ID NO: 59289 - DNA, 20 bp, Homo Sapiens
cagttggtagagcatcagac

SEQ ID NO: 59290 - DNA, 24 bp, Homo Sapiens
gttcgagcccacccagggacgcca

SEQ ID NO: 59291 - DNA, 19 bp, Homo Sapiens
gatagctcagtcggtagag

SEQ ID NO: 59292 - DNA, 24 bp, Homo Sapiens
agcttaaacccccttatttctacc

SEQ ID NO: 59293 - DNA, 26 bp, Homo Sapiens
aagaactgctaactcatgcccccatg

SEQ ID NO: 59294 - DNA, 29 bp, Homo Sapiens
ttttcatatcattggtcgtggttgtagtc

SEQ ID NO: 59295 - DNA, 16 bp, Homo Sapiens
ttcaaatcccggacga

SEQ ID NO: 59296 - DNA, 17 bp, Homo Sapiens
ggttatcacgtctgctt

SEQ ID NO: 59297 - DNA, 33 bp, Homo Sapiens; identical to SEQ ID NO: 18196

SEQ ID NO: 59298 - DNA, 37 bp, Homo Sapiens; identical to SEQ ID NO: 27924

SEQ ID NO: 59299 - DNA, 29 bp, Homo Sapiens
gaaaaagtcatggaggccatggggttggc

SEQ ID NO: 59300 - DNA, 25 bp, Homo Sapiens
aagcattggactgtaaatctaaaga

SEQ ID NO: 59301 - DNA, 40 bp, Homo Sapiens; identical to SEQ ID NO: 1078

SEQ ID NO: 59302 - DNA, 27 bp, Homo Sapiens
ggtagaattctcgcctgccacgcggga

SEQ ID NO: 59303 - DNA, 24 bp, Homo Sapiens
ggttcaattcctcttcttaacacc

SEQ ID NO: 59304 - DNA, 36 bp, Homo Sapiens; identical to SEQ ID NO: 23714

SEQ ID NO: 59305 - DNA, 25 bp, Homo Sapiens
cagaccaagagccttcaaagccctc

SEQ ID NO: 59306 - DNA, 29 bp, Homo Sapiens
cagtcggtagagcatgggactcttaatcc

SEQ ID NO: 59307 - DNA, 34 bp, Homo Sapiens; identical to SEQ ID NO: 18264

SEQ ID NO: 59308 - DNA, 34 bp, Homo Sapiens; identical to SEQ ID NO: 29575

SEQ ID NO: 59309 - DNA, 17 bp, Homo Sapiens
aaaagagttactttgat

SEQ ID NO: 59310 - DNA, 16 bp, Homo Sapiens
aacccccttatttcta

SEQ ID NO: 59311 - DNA, 30 bp, Homo Sapiens; identical to SEQ ID NO: 3304

SEQ ID NO: 59312 - DNA, 33 bp, Homo Sapiens; identical to SEQ ID NO: 13751

SEQ ID NO: 59313 - DNA, 29 bp, Homo Sapiens
ctcctcgttagtatagtggtgagtatccc

SEQ ID NO: 59314 - DNA, 30 bp, Homo Sapiens; identical to SEQ ID NO: 16867

SEQ ID NO: 59315 - DNA, 36 bp, Homo Sapiens; identical to SEQ ID NO: 17283

SEQ ID NO: 59316 - DNA, 37 bp, Homo Sapiens; identical to SEQ ID NO: 20631

SEQ ID NO: 59317 - DNA, 46 bp, Homo Sapiens; identical to SEQ ID NO: 23097

SEQ ID NO: 59318 - DNA, 25 bp, Homo Sapiens
tagaattctcgcctgccacgcggga

SEQ ID NO: 59319 - DNA, 30 bp, Homo Sapiens; identical to SEQ ID NO: 25109

SEQ ID NO: 59320 - DNA, 21 bp, Homo Sapiens
tctcataatctgaaggtcgtg

SEQ ID NO: 59321 - DNA, 34 bp, Homo Sapiens; identical to SEQ ID NO: 29843

SEQ ID NO: 59322 - DNA, 32 bp, Homo Sapiens; identical to SEQ ID NO: 30922

SEQ ID NO: 59323 - DNA, 23 bp, Homo Sapiens
ggtagcgtggccgagcggtctaa

SEQ ID NO: 59324 - DNA, 18 bp, Homo Sapiens
atcacgtcggggtcacca

SEQ ID NO: 59325 - DNA, 30 bp, Homo Sapiens; identical to SEQ ID NO: 10862

SEQ ID NO: 59326 - DNA, 25 bp, Homo Sapiens
gatttcaacttaacttgaccgctct

SEQ ID NO: 59327 - DNA, 26 bp, Homo Sapiens
gtttccgtagtgtagtggtcatcacg

SEQ ID NO: 59328 - DNA, 27 bp, Homo Sapiens
aaacatcagattgtgaatctgacaaca

SEQ ID NO: 59329 - DNA, 21 bp, Homo Sapiens
gttcgattcccggtcagggaa

SEQ ID NO: 59330 - DNA, 16 bp, Homo Sapiens
cccgggtttcggcacc

SEQ ID NO: 59331 - DNA, 21 bp, Homo Sapiens
tcgaatccggctcgaaggacc

SEQ ID NO: 59332 - DNA, 30 bp, Homo Sapiens; identical to SEQ ID NO: 2232

SEQ ID NO: 59333 - DNA, 32 bp, Homo Sapiens; identical to SEQ ID NO: 16849

SEQ ID NO: 59334 - DNA, 20 bp, Homo Sapiens
gcgttggtggtatagtggta

SEQ ID NO: 59335 - DNA, 21 bp, Homo Sapiens
ttaaacccccttatttctacc

SEQ ID NO: 59336 - DNA, 36 bp, Homo Sapiens; identical to SEQ ID NO: 10674

SEQ ID NO: 59337 - DNA, 16 bp, Homo Sapiens
aagattaagagaacca

SEQ ID NO: 59338 - DNA, 28 bp, Homo Sapiens
ccatggtgtaatggttagcactctggac

SEQ ID NO: 59339 - DNA, 30 bp, Homo Sapiens; identical to SEQ ID NO: 2272

SEQ ID NO: 59340 - DNA, 20 bp, Homo Sapiens
gtggttatcacgtctgcttt

SEQ ID NO: 59341 - DNA, 29 bp, Homo Sapiens
ttgtgggtttaagtcccattggtctagcc

SEQ ID NO: 59342 - DNA, 27 bp, Homo Sapiens
catggtgtaatggttagcactctggac

SEQ ID NO: 59343 - DNA, 30 bp, Homo Sapiens; identical to SEQ ID NO: 8183

SEQ ID NO: 59344 - DNA, 34 bp, Homo Sapiens; identical to SEQ ID NO: 16641

SEQ ID NO: 59345 - DNA, 33 bp, Homo Sapiens; identical to SEQ ID NO: 19364

SEQ ID NO: 59346 - DNA, 24 bp, Homo Sapiens
tgtctaacaacatggctttctcac

SEQ ID NO: 59347 - DNA, 46 bp, Homo Sapiens; identical to SEQ ID NO: 9934

SEQ ID NO: 59348 - DNA, 26 bp, Homo Sapiens
cgctctcaccgccgcggcccgggttc

SEQ ID NO: 59349 - DNA, 24 bp, Homo Sapiens
tagtggttagtatccccgcctgtc

SEQ ID NO: 59350 - DNA, 22 bp, Homo Sapiens
cccattcttgcgacccgggttc

SEQ ID NO: 59351 - DNA, 32 bp, Homo Sapiens; identical to SEQ ID NO: 18195

SEQ ID NO: 59352 - DNA, 17 bp, Homo Sapiens
atcctatatatcttacc

SEQ ID NO: 59353 - DNA, 38 bp, Homo Sapiens; identical to SEQ ID NO: 1011

SEQ ID NO: 59354 - DNA, 23 bp, Homo Sapiens
gttcgagtcccatctgggtcgcc

SEQ ID NO: 59355 - DNA, 34 bp, Homo Sapiens; identical to SEQ ID NO: 4152

SEQ ID NO: 59356 - DNA, 29 bp, Homo Sapiens
tgcgacccgggttcgattcccgggcggcg

SEQ ID NO: 59357 - DNA, 21 bp, Homo Sapiens
aaacctttttccaaggacacc

SEQ ID NO: 59358 - DNA, 16 bp, Homo Sapiens
ctaggggtatgattct

SEQ ID NO: 59359 - DNA, 27 bp, Homo Sapiens
gcccccatgtctaacaacatggctttc

SEQ ID NO: 59360 - DNA, 18 bp, Homo Sapiens
tgtagtgtagtggttatc

SEQ ID NO: 59361 - DNA, 34 bp, Homo Sapiens; identical to SEQ ID NO: 8270

SEQ ID NO: 59362 - DNA, 16 bp, Homo Sapiens
cgatccccagtacctc

SEQ ID NO: 59363 - DNA, 37 bp, Homo Sapiens; identical to SEQ ID NO: 21653

SEQ ID NO: 59364 - DNA, 25 bp, Homo Sapiens
taagttgcaatacttaatttctgcc

SEQ ID NO: 59365 - DNA, 28 bp, Homo Sapiens
taggagcttaaacccccttatttctacc

SEQ ID NO: 59366 - DNA, 27 bp, Homo Sapiens
tctcgcctgccacgcgggaggcccggg

SEQ ID NO: 59367 - DNA, 17 bp, Homo Sapiens
ccccagcatctccacca

SEQ ID NO: 59368 - DNA, 17 bp, Homo Sapiens
gagtatccccgcctgtc

SEQ ID NO: 59369 - DNA, 18 bp, Homo Sapiens
ctgttaactaagtgtttg

SEQ ID NO: 59370 - DNA, 22 bp, Homo Sapiens
ggggatgtagctcagtggtaga

SEQ ID NO: 59371 - DNA, 37 bp, Homo Sapiens; identical to SEQ ID NO: 420

SEQ ID NO: 59372 - DNA, 32 bp, Homo Sapiens; identical to SEQ ID NO: 836

SEQ ID NO: 59373 - DNA, 27 bp, Homo Sapiens
aagagaaccaacacctctttacagtga

SEQ ID NO: 59374 - DNA, 26 bp, Homo Sapiens
aaggctgcgtgttcgaatcacgtcgg

SEQ ID NO: 59375 - DNA, 47 bp, Homo Sapiens; identical to SEQ ID NO: 3056

SEQ ID NO: 59376 - DNA, 35 bp, Homo Sapiens; identical to SEQ ID NO: 7424

SEQ ID NO: 59377 - DNA, 20 bp, Homo Sapiens
caattcctcttcttaacacc

SEQ ID NO: 59378 - DNA, 45 bp, Homo Sapiens; identical to SEQ ID NO: 8798

SEQ ID NO: 59379 - DNA, 34 bp, Homo Sapiens; identical to SEQ ID NO: 10908

SEQ ID NO: 59380 - DNA, 27 bp, Homo Sapiens
cctcgttagtatagtggttagtatccc

SEQ ID NO: 59381 - DNA, 17 bp, Homo Sapiens
cgcgggttcgaaccccg

SEQ ID NO: 59382 - DNA, 17 bp, Homo Sapiens
cgcgggttcgatccccg

SEQ ID NO: 59383 - DNA, 34 bp, Homo Sapiens; identical to SEQ ID NO: 14368

SEQ ID NO: 59384 - DNA, 48 bp, Homo Sapiens; identical to SEQ ID NO: 14547

SEQ ID NO: 59385 - DNA, 31 bp, Homo Sapiens; identical to SEQ ID NO: 14878

SEQ ID NO: 59386 - DNA, 42 bp, Homo Sapiens; identical to SEQ ID NO: 16485

SEQ ID NO: 59387 - DNA, 32 bp, Homo Sapiens; identical to SEQ ID NO: 16529

SEQ ID NO: 59388 - DNA, 39 bp, Homo Sapiens; identical to SEQ ID NO: 17118

SEQ ID NO: 59389 - DNA, 45 bp, Homo Sapiens; identical to SEQ ID NO: 20165

SEQ ID NO: 59390 - DNA, 30 bp, Homo Sapiens; identical to SEQ ID NO: 23107

SEQ ID NO: 59391 - DNA, 48 bp, Homo Sapiens; identical to SEQ ID NO: 23495

SEQ ID NO: 59392 - DNA, 34 bp, Homo Sapiens; identical to SEQ ID NO: 24592

SEQ ID NO: 59393 - DNA, 24 bp, Homo Sapiens
tccgaggtgattttcatattgaat

SEQ ID NO: 59394 - DNA, 34 bp, Homo Sapiens; identical to SEQ ID NO: 27197

SEQ ID NO: 59395 - DNA, 24 bp, Homo Sapiens
ttgacccgggttcgattcccggcc

SEQ ID NO: 59396 - DNA, 39 bp, Homo Sapiens; identical to SEQ ID NO: 30353

SEQ ID NO: 59397 - DNA, 20 bp, Homo Sapiens
gttaaagactttttctctga

SEQ ID NO: 59398 - DNA, 21 bp, Homo Sapiens
gtggttgtagtccgtgcgaga

SEQ ID NO: 59399 - DNA, 19 bp, Homo Sapiens
atcattggtcgtggttgta

SEQ ID NO: 59400 - DNA, 18 bp, Homo Sapiens
tcgtggttgtagtccgtg

SEQ ID NO: 59401 - DNA, 33 bp, Homo Sapiens; identical to SEQ ID NO: 6211

SEQ ID NO: 59402 - DNA, 21 bp, Homo Sapiens
agtgaagcattggactgtaaa

SEQ ID NO: 59403 - DNA, 23 bp, Homo Sapiens
gttcgattctcatagtcctagcc

SEQ ID NO: 59404 - DNA, 21 bp, Homo Sapiens
caacattcaaaaaagagtacc

SEQ ID NO: 59405 - DNA, 27 bp, Homo Sapiens
gcaatggtggttcagtggtagaattct

SEQ ID NO: 59406 - DNA, 16 bp, Homo Sapiens
tcattggtcgtggttg

SEQ ID NO: 59407 - DNA, 21 bp, Homo Sapiens
gttatacccttcccgtactac

SEQ ID NO: 59408 - DNA, 26 bp, Homo Sapiens
tggtctagcggttaggattcctggtt

SEQ ID NO: 59409 - DNA, 30 bp, Homo Sapiens; identical to SEQ ID NO: 25843

SEQ ID NO: 59410 - DNA, 27 bp, Homo Sapiens
tccctggtggtctagtggctaggattc

SEQ ID NO: 59411 - DNA, 23 bp, Homo Sapiens
tagtactctgcgttgtggccgca

SEQ ID NO: 59412 - DNA, 18 bp, Homo Sapiens
aggcctctttttaccacc

SEQ ID NO: 59413 - DNA, 21 bp, Homo Sapiens
atagtggtgagtatccccgcc

SEQ ID NO: 59414 - DNA, 35 bp, Homo Sapiens; identical to SEQ ID NO: 18284

SEQ ID NO: 59415 - DNA, 18 bp, Homo Sapiens
cctcctcaaagcaataca

SEQ ID NO: 59416 - DNA, 21 bp, Homo Sapiens
aatggtggagttaaagacttt

SEQ ID NO: 59417 - DNA, 22 bp, Homo Sapiens
gagcttaaacccccttatttct

SEQ ID NO: 59418 - DNA, 35 bp, Homo Sapiens; identical to SEQ ID NO: 24012

SEQ ID NO: 59419 - DNA, 41 bp, Homo Sapiens; identical to SEQ ID NO: 23372

SEQ ID NO: 59420 - DNA, 25 bp, Homo Sapiens
ggtagaattctcgcctgccacgcgg

SEQ ID NO: 59421 - DNA, 22 bp, Homo Sapiens
ttcgagtctcggtggaacctcc

SEQ ID NO: 59422 - DNA, 17 bp, Homo Sapiens
acacgcagaaggtcctg

SEQ ID NO: 59423 - DNA, 29 bp, Homo Sapiens
cccgggttcaatccccggcacctccacca

SEQ ID NO: 59424 - DNA, 21 bp, Homo Sapiens
ctcagggatgggttcgattct

SEQ ID NO: 59425 - DNA, 34 bp, Homo Sapiens; identical to SEQ ID NO: 24475

SEQ ID NO: 59426 - DNA, 19 bp, Homo Sapiens
ctcataatctgaaggtcct

SEQ ID NO: 59427 - DNA, 35 bp, Homo Sapiens; identical to SEQ ID NO: 27922

SEQ ID NO: 59428 - DNA, 26 bp, Homo Sapiens
aattatgataatcatatttaccaacc

SEQ ID NO: 59429 - DNA, 20 bp, Homo Sapiens
gtggttatcacatctgcttt

SEQ ID NO: 59430 - DNA, 18 bp, Homo Sapiens
agattgagggttcgagtc

SEQ ID NO: 59431 - DNA, 26 bp, Homo Sapiens
aggcggcccgggttcgactcccggtg

SEQ ID NO: 59432 - DNA, 20 bp, Homo Sapiens
agtggttatcacgtctgctt

SEQ ID NO: 59433 - DNA, 33 bp, Homo Sapiens; identical to SEQ ID NO: 11630

SEQ ID NO: 59434 - DNA, 16 bp, Homo Sapiens
ttcgatccccggcatc

SEQ ID NO: 59435 - DNA, 25 bp, Homo Sapiens
ttgacaacattcaaaaaagagtacc

SEQ ID NO: 59436 - DNA, 20 bp, Homo Sapiens
gcattggtggttcagtggta

SEQ ID NO: 59437 - DNA, 19 bp, Homo Sapiens
gttcgattcccggccaacg

SEQ ID NO: 59438 - DNA, 45 bp, Homo Sapiens; identical to SEQ ID NO: 57

SEQ ID NO: 59439 - DNA, 32 bp, Homo Sapiens; identical to SEQ ID NO: 415

SEQ ID NO: 59440 - DNA, 37 bp, Homo Sapiens; identical to SEQ ID NO: 2889

SEQ ID NO: 59441 - DNA, 31 bp, Homo Sapiens; identical to SEQ ID NO: 2978

SEQ ID NO: 59442 - DNA, 28 bp, Homo Sapiens
agaaatatgtctgataaaagagttactt

SEQ ID NO: 59443 - DNA, 32 bp, Homo Sapiens; identical to SEQ ID NO: 6370

SEQ ID NO: 59444 - DNA, 28 bp, Homo Sapiens
atgggttcgattctcatagtcctagcca

SEQ ID NO: 59445 - DNA, 16 bp, Homo Sapiens
cacgcgggagaccggg

SEQ ID NO: 59446 - DNA, 48 bp, Homo Sapiens; identical to SEQ ID NO: 8654

SEQ ID NO: 59447 - DNA, 38 bp, Homo Sapiens; identical to SEQ ID NO: 8791

SEQ ID NO: 59448 - DNA, 33 bp, Homo Sapiens; identical to SEQ ID NO: 9500

SEQ ID NO: 59449 - DNA, 34 bp, Homo Sapiens; identical to SEQ ID NO: 9708

SEQ ID NO: 59450 - DNA, 26 bp, Homo Sapiens
ccagggttcaagtccctgttcaggcg

SEQ ID NO: 59451 - DNA, 27 bp, Homo Sapiens
ctaaataagctatcgggcccatacccc

SEQ ID NO: 59452 - DNA, 36 bp, Homo Sapiens; identical to SEQ ID NO: 13155

SEQ ID NO: 59453 - DNA, 27 bp, Homo Sapiens
cttacctcctcaaagcaatacactgaa

SEQ ID NO: 59454 - DNA, 37 bp, Homo Sapiens; identical to SEQ ID NO: 14563

SEQ ID NO: 59455 - DNA, 44 bp, Homo Sapiens; identical to SEQ ID NO: 15269

SEQ ID NO: 59456 - DNA, 31 bp, Homo Sapiens; identical to SEQ ID NO: 15332

SEQ ID NO: 59457 - DNA, 25 bp, Homo Sapiens
gagttcaaatctcgctggggcctcc

SEQ ID NO: 59458 - DNA, 25 bp, Homo Sapiens
gctaaataagctatcgggcccatac

SEQ ID NO: 59459 - DNA, 32 bp, Homo Sapiens; identical to SEQ ID NO: 17641

SEQ ID NO: 59460 - DNA, 32 bp, Homo Sapiens; identical to SEQ ID NO: 18677

SEQ ID NO: 59461 - DNA, 38 bp, Homo Sapiens; identical to SEQ ID NO: 19223

SEQ ID NO: 59462 - DNA, 30 bp, Homo Sapiens; identical to SEQ ID NO: 22648

SEQ ID NO: 59463 - DNA, 39 bp, Homo Sapiens; identical to SEQ ID NO: 25164

SEQ ID NO: 59464 - DNA, 16 bp, Homo Sapiens
tccctgttcaggcgcc

SEQ ID NO: 59465 - DNA, 36 bp, Homo Sapiens; identical to SEQ ID NO: 26428

SEQ ID NO: 59466 - DNA, 35 bp, Homo Sapiens; identical to SEQ ID NO: 28871

SEQ ID NO: 59467 - DNA, 39 bp, Homo Sapiens; identical to SEQ ID NO: 30468

SEQ ID NO: 59468 - DNA, 23 bp, Homo Sapiens
agttaaagactttttctctgacc

SEQ ID NO: 59469 - DNA, 24 bp, Homo Sapiens
gttgtagtccgtgcgagaatacca

SEQ ID NO: 59470 - DNA, 30 bp, Homo Sapiens; identical to SEQ ID NO: 6208

SEQ ID NO: 59471 - DNA, 26 bp, Homo Sapiens
tttcaacttaacttgaccgctctgac

SEQ ID NO: 59472 - DNA, 28 bp, Homo Sapiens
gatttcaacttaacttgaccgctctgac

SEQ ID NO: 59473 - DNA, 29 bp, Homo Sapiens
taaaatggctgagtgaagcattggactgt

SEQ ID NO: 59474 - DNA, 23 bp, Homo Sapiens
ggttagcactctggactctgaat

SEQ ID NO: 59475 - DNA, 18 bp, Homo Sapiens
cagattgtgaatctgaca

SEQ ID NO: 59476 - DNA, 20 bp, Homo Sapiens
ggtaaaatggctgagtgaag

SEQ ID NO: 59477 - DNA, 22 bp, Homo Sapiens
gcgttggtggtatagtggttag

SEQ ID NO: 59478 - DNA, 28 bp, Homo Sapiens
tcgtggttgtagtccgtgcgagaatacc

SEQ ID NO: 59479 - DNA, 21 bp, Homo Sapiens
atagtggttagtactctgcgt

SEQ ID NO: 59480 - DNA, 26 bp, Homo Sapiens
gagatttcaacttaacttgaccgctc

SEQ ID NO: 59481 - DNA, 21 bp, Homo Sapiens
ttatacccttcccgtactacc

SEQ ID NO: 59482 - DNA, 21 bp, Homo Sapiens
gggggtatagctcagtggtag

SEQ ID NO: 59483 - DNA, 19 bp, Homo Sapiens
aattaactagttttgacaa

SEQ ID NO: 59484 - DNA, 36 bp, Homo Sapiens; identical to SEQ ID NO: 6410

SEQ ID NO: 59485 - DNA, 33 bp, Homo Sapiens; identical to SEQ ID NO: 19757

SEQ ID NO: 59486 - DNA, 31 bp, Homo Sapiens; identical to SEQ ID NO: 24472

SEQ ID NO: 59487 - DNA, 24 bp, Homo Sapiens
gttcgattccttccttttttgcca

SEQ ID NO: 59488 - DNA, 25 bp, Homo Sapiens
gtagcgtggccgagcggtctaaggc

SEQ ID NO: 59489 - DNA, 16 bp, Homo Sapiens
tccctgtggtctagtg

SEQ ID NO: 59490 - DNA, 24 bp, Homo Sapiens
gtttatgtagcttacctcctcaaa

SEQ ID NO: 59491 - DNA, 27 bp, Homo Sapiens
tcgtggttgtagtccgtgcgagaatac

SEQ ID NO: 59492 - DNA, 36 bp, Homo Sapiens; identical to SEQ ID NO: 30465

SEQ ID NO: 59493 - DNA, 20 bp, Homo Sapiens
ttcaaacctgccggggcttc

SEQ ID NO: 59494 - DNA, 28 bp, Homo Sapiens
tgtgggtttaagtcccattggtctagcc

SEQ ID NO: 59495 - DNA, 23 bp, Homo Sapiens
gctcagtcggtagagcatcagac

SEQ ID NO: 59496 - DNA, 18 bp, Homo Sapiens
gctatccattggtcttag

SEQ ID NO: 59497 - DNA, 47 bp, Homo Sapiens; identical to SEQ ID NO: 9935

SEQ ID NO: 59498 - DNA, 17 bp, Homo Sapiens
acccttcccgtactacc

SEQ ID NO: 59499 - DNA, 25 bp, Homo Sapiens
aaccaaaacatcagattgtgaatct

SEQ ID NO: 59500 - DNA, 30 bp, Homo Sapiens; identical to SEQ ID NO: 23652

SEQ ID NO: 59501 - DNA, 41 bp, Homo Sapiens; identical to SEQ ID NO: 25334

SEQ ID NO: 59502 - DNA, 26 bp, Homo Sapiens
aagctcacaagaactgctaactcatg

SEQ ID NO: 59503 - DNA, 23 bp, Homo Sapiens
catcagattgtgaatctgacaac

SEQ ID NO: 59504 - DNA, 16 bp, Homo Sapiens
gttatcacgtctgctt

SEQ ID NO: 59505 - DNA, 22 bp, Homo Sapiens
cggcccgggttcgattcccggt

SEQ ID NO: 59506 - DNA, 33 bp, Homo Sapiens; identical to SEQ ID NO: 16770

SEQ ID NO: 59507 - DNA, 20 bp, Homo Sapiens
ggttcgagtcccggcggagt

SEQ ID NO: 59508 - DNA, 46 bp, Homo Sapiens; identical to SEQ ID NO: 17029

SEQ ID NO: 59509 - DNA, 36 bp, Homo Sapiens; identical to SEQ ID NO: 8576

SEQ ID NO: 59510 - DNA, 27 bp, Homo Sapiens
gtagaattctcgcctgccacgcgggag

SEQ ID NO: 59511 - DNA, 27 bp, Homo Sapiens
agatgaaaacctttttccaaggacacc

SEQ ID NO: 59512 - DNA, 28 bp, Homo Sapiens
aggagcttaaacccccttatttctacca

SEQ ID NO: 59513 - DNA, 25 bp, Homo Sapiens
atggggtgtgataggtggcacggag

SEQ ID NO: 59514 - DNA, 22 bp, Homo Sapiens
cagcttcaaacctgccggggct

SEQ ID NO: 59515 - DNA, 34 bp, Homo Sapiens; identical to SEQ ID NO: 10156

SEQ ID NO: 59516 - DNA, 16 bp, Homo Sapiens
cttaatcccagggtcg

SEQ ID NO: 59517 - DNA, 37 bp, Homo Sapiens; identical to SEQ ID NO: 19549

SEQ ID NO: 59518 - DNA, 22 bp, Homo Sapiens
ttcgaagaagcagcttcaaacc

SEQ ID NO: 59519 - DNA, 43 bp, Homo Sapiens; identical to SEQ ID NO: 217

SEQ ID NO: 59520 - DNA, 27 bp, Homo Sapiens
gatggggtgtgataggtggcacggaga

SEQ ID NO: 59521 - DNA, 27 bp, Homo Sapiens
taacacaaagcacccaacttacactta

SEQ ID NO: 59522 - DNA, 24 bp, Homo Sapiens
tctgacaacagaggcttacgaccc

SEQ ID NO: 59523 - DNA, 34 bp, Homo Sapiens; identical to SEQ ID NO: 27921

SEQ ID NO: 59524 - DNA, 18 bp, Homo Sapiens
ctcccggtgtgggaacca

SEQ ID NO: 59525 - DNA, 20 bp, Homo Sapiens
accaggatggccgagtggtt

SEQ ID NO: 59526 - DNA, 21 bp, Homo Sapiens
agagtaaataataggagctta

SEQ ID NO: 59527 - DNA, 23 bp, Homo Sapiens
aaaaaccatttcataactttgtc

SEQ ID NO: 59528 - DNA, 34 bp, Homo Sapiens; identical to SEQ ID NO: 771

SEQ ID NO: 59529 - DNA, 16 bp, Homo Sapiens
aatcccaccgctgcca

SEQ ID NO: 59530 - DNA, 33 bp, Homo Sapiens; identical to SEQ ID NO: 3238

SEQ ID NO: 59531 - DNA, 26 bp, Homo Sapiens
agaggcttacgaccccttatttaccc

SEQ ID NO: 59532 - DNA, 24 bp, Homo Sapiens
agattaagagaaccaacacctctt

SEQ ID NO: 59533 - DNA, 41 bp, Homo Sapiens; identical to SEQ ID NO: 4159

SEQ ID NO: 59534 - DNA, 25 bp, Homo Sapiens
agcagcttcaaacctgccggggctt

SEQ ID NO: 59535 - DNA, 27 bp, Homo Sapiens
agcttacctcctcaaagcaatacactg

SEQ ID NO: 59536 - DNA, 36 bp, Homo Sapiens; identical to SEQ ID NO: 7250

SEQ ID NO: 59537 - DNA, 29 bp, Homo Sapiens
caacagaggcttacgaccccttatttacc

SEQ ID NO: 59538 - DNA, 37 bp, Homo Sapiens; identical to SEQ ID NO: 8387

SEQ ID NO: 59539 - DNA, 41 bp, Homo Sapiens; identical to SEQ ID NO: 8794

SEQ ID NO: 59540 - DNA, 48 bp, Homo Sapiens; identical to SEQ ID NO: 10739

SEQ ID NO: 59541 - DNA, 40 bp, Homo Sapiens; identical to SEQ ID NO: 10749

SEQ ID NO: 59542 - DNA, 28 bp, Homo Sapiens
cgggagaccggggttcaattccccgacg

SEQ ID NO: 59543 - DNA, 33 bp, Homo Sapiens; identical to SEQ ID NO: 13202

SEQ ID NO: 59544 - DNA, 32 bp, Homo Sapiens; identical to SEQ ID NO: 13378

SEQ ID NO: 59545 - DNA, 20 bp, Homo Sapiens
cttaggagatttcaacttaa

SEQ ID NO: 59546 - DNA, 42 bp, Homo Sapiens; identical to SEQ ID NO: 14975

SEQ ID NO: 59547 - DNA, 40 bp, Homo Sapiens; identical to SEQ ID NO: 20625

SEQ ID NO: 59548 - DNA, 37 bp, Homo Sapiens; identical to SEQ ID NO: 21409

SEQ ID NO: 59549 - DNA, 47 bp, Homo Sapiens; identical to SEQ ID NO: 21547

SEQ ID NO: 59550 - DNA, 41 bp, Homo Sapiens; identical to SEQ ID NO: 21569

SEQ ID NO: 59551 - DNA, 32 bp, Homo Sapiens; identical to SEQ ID NO: 22222

SEQ ID NO: 59552 - DNA, 31 bp, Homo Sapiens; identical to SEQ ID NO: 22926

SEQ ID NO: 59553 - DNA, 25 bp, Homo Sapiens
taacgccaaggtcgcgggttcgaac

SEQ ID NO: 59554 - DNA, 33 bp, Homo Sapiens; identical to SEQ ID NO: 24144

SEQ ID NO: 59555 - DNA, 33 bp, Homo Sapiens; identical to SEQ ID NO: 24447

SEQ ID NO: 59556 - DNA, 16 bp, Homo Sapiens
tcagtctcataatctg

SEQ ID NO: 59557 - DNA, 28 bp, Homo Sapiens
tcagtggtagaattctcgcctgccacgc

SEQ ID NO: 59558 - DNA, 34 bp, Homo Sapiens; identical to SEQ ID NO: 25424

SEQ ID NO: 59559 - DNA, 16 bp, Homo Sapiens
tcgaacctcagagggg

SEQ ID NO: 59560 - DNA, 44 bp, Homo Sapiens; identical to SEQ ID NO: 27177

SEQ ID NO: 59561 - DNA, 43 bp, Homo Sapiens; identical to SEQ ID NO: 28652

SEQ ID NO: 59562 - DNA, 16 bp, Homo Sapiens
ttaggagatttcaact

SEQ ID NO: 59563 - DNA, 31 bp, Homo Sapiens; identical to SEQ ID NO: 29261

SEQ ID NO: 59564 - DNA, 33 bp, Homo Sapiens; identical to SEQ ID NO: 30347

SEQ ID NO: 59565 - DNA, 24 bp, Homo Sapiens
ttggtgcaactccaaataaaagta

SEQ ID NO: 59566 - DNA, 40 bp, Homo Sapiens; identical to SEQ ID NO: 30469

SEQ ID NO: 59567 - DNA, 19 bp, Homo Sapiens
gagtgaagcattggactgt

SEQ ID NO: 59568 - DNA, 20 bp, Homo Sapiens
tgagtgaagcattggactgt

SEQ ID NO: 59569 - DNA, 26 bp, Homo Sapiens
ttggtcgtggttgtagtccgtgcgag

SEQ ID NO: 59570 - DNA, 22 bp, Homo Sapiens
atcattggtcgtggttgtagtc

SEQ ID NO: 59571 - DNA, 22 bp, Homo Sapiens
ctgccacgcgggaggcccgggt

SEQ ID NO: 59572 - DNA, 24 bp, Homo Sapiens
ctgtaaagctaacttagcattaac

SEQ ID NO: 59573 - DNA, 21 bp, Homo Sapiens
tcagtcggtagagcatgagac

SEQ ID NO: 59574 - DNA, 22 bp, Homo Sapiens
gttaggcctctttttaccacca

SEQ ID NO: 59575 - DNA, 29 bp, Homo Sapiens
ggtcgtggttgtagtccgtgcgagaatac

SEQ ID NO: 59576 - DNA, 25 bp, Homo Sapiens
gcgccgctggtgtagtggtatcatg

SEQ ID NO: 59577 - DNA, 24 bp, Homo Sapiens
ctagcggttaggattcctggtttt

SEQ ID NO: 59578 - DNA, 18 bp, Homo Sapiens
gtccctgtccaggcgcca

SEQ ID NO: 59579 - DNA, 24 bp, Homo Sapiens
ggagttaaagactttttctctgac

SEQ ID NO: 59580 - DNA, 21 bp, Homo Sapiens
taaacccccttatttctacca

SEQ ID NO: 59581 - DNA, 33 bp, Homo Sapiens; identical to SEQ ID NO: 25479

SEQ ID NO: 59582 - DNA, 30 bp, Homo Sapiens; identical to SEQ ID NO: 10495

SEQ ID NO: 59583 - DNA, 33 bp, Homo Sapiens; identical to SEQ ID NO: 13256

SEQ ID NO: 59584 - DNA, 29 bp, Homo Sapiens
gagtgaagcattggactgtaaatctaaag

SEQ ID NO: 59585 - DNA, 34 bp, Homo Sapiens; identical to SEQ ID NO: 20367

SEQ ID NO: 59586 - DNA, 36 bp, Homo Sapiens; identical to SEQ ID NO: 21408

SEQ ID NO: 59587 - DNA, 29 bp, Homo Sapiens
caggcggcccgggttcgactcccggtgtg

SEQ ID NO: 59588 - DNA, 25 bp, Homo Sapiens
gctggtgtagtggtatcatgcaaga

SEQ ID NO: 59589 - DNA, 30 bp, Homo Sapiens; identical to SEQ ID NO: 1152

SEQ ID NO: 59590 - DNA, 26 bp, Homo Sapiens
ctggactctgaatccagcgatccgag

SEQ ID NO: 59591 - DNA, 26 bp, Homo Sapiens
gttggttatacccttcccgtactacc

SEQ ID NO: 59592 - DNA, 16 bp, Homo Sapiens
attctcgcctgccacg

SEQ ID NO: 59593 - DNA, 21 bp, Homo Sapiens
gttcgatcccgggtttcggca

SEQ ID NO: 59594 - DNA, 25 bp, Homo Sapiens
gcccccatgtctaacaacatggctt

SEQ ID NO: 59595 - DNA, 23 bp, Homo Sapiens
gtagcgtggccgagcggtctaag

SEQ ID NO: 59596 - DNA, 27 bp, Homo Sapiens
gtaagttgcaatacttaatttctgcca

SEQ ID NO: 59597 - DNA, 22 bp, Homo Sapiens
gaaagctcacaagaactgctaa

SEQ ID NO: 59598 - DNA, 27 bp, Homo Sapiens
ggcggcccgggttcgactcccggtgtg

SEQ ID NO: 59599 - DNA, 20 bp, Homo Sapiens
gtttgtgggtttaagtccca

SEQ ID NO: 59600 - DNA, 34 bp, Homo Sapiens; identical to SEQ ID NO: 18756

SEQ ID NO: 59601 - DNA, 27 bp, Homo Sapiens
agagaaccaacacctctttacagtgac

SEQ ID NO: 59602 - DNA, 27 bp, Homo Sapiens
acaggggttaggcctctttttaccacc

SEQ ID NO: 59603 - DNA, 22 bp, Homo Sapiens
cttaggagatttcaacttaact

SEQ ID NO: 59604 - DNA, 32 bp, Homo Sapiens; identical to SEQ ID NO: 18692

SEQ ID NO: 59605 - DNA, 16 bp, Homo Sapiens
ggtagagcatgggact

SEQ ID NO: 59606 - DNA, 27 bp, Homo Sapiens
ggtaatcgcataaaacttaaaacttta

SEQ ID NO: 59607 - DNA, 26 bp, Homo Sapiens
cacccaacttacacttaggagatttc

SEQ ID NO: 59608 - DNA, 21 bp, Homo Sapiens
gctttggggggttcgattcct

SEQ ID NO: 59609 - DNA, 18 bp, Homo Sapiens
aaccaggcggaaacacca

SEQ ID NO: 59610 - DNA, 23 bp, Homo Sapiens
acaaaacgaatgatttcgactca

SEQ ID NO: 59611 - DNA, 37 bp, Homo Sapiens; identical to SEQ ID NO: 22460

SEQ ID NO: 59612 - DNA, 40 bp, Homo Sapiens; identical to SEQ ID NO: 1732

SEQ ID NO: 59613 - DNA, 43 bp, Homo Sapiens; identical to SEQ ID NO: 15268

SEQ ID NO: 59614 - DNA, 40 bp, Homo Sapiens; identical to SEQ ID NO: 16647

SEQ ID NO: 59615 - DNA, 17 bp, Homo Sapiens
gctagctcagtcggtag

SEQ ID NO: 59616 - DNA, 23 bp, Homo Sapiens
gtttaaccaaaacatcagattgt

SEQ ID NO: 59617 - DNA, 24 bp, Homo Sapiens
tacctcctcaaagcaatacactga

SEQ ID NO: 59618 - DNA, 33 bp, Homo Sapiens; identical to SEQ ID NO: 18411

SEQ ID NO: 59619 - DNA, 23 bp, Homo Sapiens
gttcaattcctcttcttaacacc

SEQ ID NO: 59620 - DNA, 22 bp, Homo Sapiens
ttaggattcggcgctctcaccg

SEQ ID NO: 59621 - DNA, 29 bp, Homo Sapiens
ttggtggttcgatcccacccagggacgcc

SEQ ID NO: 59622 - DNA, 16 bp, Homo Sapiens
aggtcagctaaataag

SEQ ID NO: 59623 - DNA, 44 bp, Homo Sapiens; identical to SEQ ID NO: 16651

SEQ ID NO: 59624 - DNA, 27 bp, Homo Sapiens
aggagcttaaacccccttatttctacc

SEQ ID NO: 59625 - DNA, 32 bp, Homo Sapiens; identical to SEQ ID NO: 17006

SEQ ID NO: 59626 - DNA, 31 bp, Homo Sapiens; identical to SEQ ID NO: 25557

SEQ ID NO: 59627 - DNA, 21 bp, Homo Sapiens
aaccaacacctctttacagtg

SEQ ID NO: 59628 - DNA, 38 bp, Homo Sapiens; identical to SEQ ID NO: 1483

SEQ ID NO: 59629 - DNA, 24 bp, Homo Sapiens
gcagcttcaaacctgccggggctt

SEQ ID NO: 59630 - DNA, 37 bp, Homo Sapiens; identical to SEQ ID NO: 26429

SEQ ID NO: 59631 - DNA, 37 bp, Homo Sapiens; identical to SEQ ID NO: 29552

SEQ ID NO: 59632 - DNA, 18 bp, Homo Sapiens
gatagctcagtcggtaga

SEQ ID NO: 59633 - DNA, 17 bp, Homo Sapiens
aaagctcacaagaactg

SEQ ID NO: 59634 - DNA, 28 bp, Homo Sapiens
aacagaggcttacgaccccttatttacc

SEQ ID NO: 59635 - DNA, 46 bp, Homo Sapiens; identical to SEQ ID NO: 1288

SEQ ID NO: 59636 - DNA, 27 bp, Homo Sapiens
aatgttggttatacccttcccgtacta

SEQ ID NO: 59637 - DNA, 41 bp, Homo Sapiens; identical to SEQ ID NO: 2455

SEQ ID NO: 59638 - DNA, 45 bp, Homo Sapiens; identical to SEQ ID NO: 2458

SEQ ID NO: 59639 - DNA, 37 bp, Homo Sapiens; identical to SEQ ID NO: 2795

SEQ ID NO: 59640 - DNA, 34 bp, Homo Sapiens; identical to SEQ ID NO: 3107

SEQ ID NO: 59641 - DNA, 33 bp, Homo Sapiens; identical to SEQ ID NO: 4184

SEQ ID NO: 59642 - DNA, 29 bp, Homo Sapiens
agcgatccgagttcaaatctcggtggaac

SEQ ID NO: 59643 - DNA, 30 bp, Homo Sapiens; identical to SEQ ID NO: 5865

SEQ ID NO: 59644 - DNA, 16 bp, Homo Sapiens
atcctatatatcttac

SEQ ID NO: 59645 - DNA, 36 bp, Homo Sapiens; identical to SEQ ID NO: 6656

SEQ ID NO: 59646 - DNA, 17 bp, Homo Sapiens
caactccaaataaaagt

SEQ ID NO: 59647 - DNA, 38 bp, Homo Sapiens; identical to SEQ ID NO: 8357

SEQ ID NO: 59648 - DNA, 34 bp, Homo Sapiens; identical to SEQ ID NO: 8877

SEQ ID NO: 59649 - DNA, 24 bp, Homo Sapiens
cagtctcataatctgaaggtcctg

SEQ ID NO: 59650 - DNA, 48 bp, Homo Sapiens; identical to SEQ ID NO: 9548

SEQ ID NO: 59651 - DNA, 41 bp, Homo Sapiens; identical to SEQ ID NO: 11549

SEQ ID NO: 59652 - DNA, 32 bp, Homo Sapiens; identical to SEQ ID NO: 12248

SEQ ID NO: 59653 - DNA, 25 bp, Homo Sapiens
cgggcccataccccgaaaatgttgg

SEQ ID NO: 59654 - DNA, 28 bp, Homo Sapiens
cgttaacttccaattaactagttttgac

SEQ ID NO: 59655 - DNA, 18 bp, Homo Sapiens
ctcagggatgggttcgat

SEQ ID NO: 59656 - DNA, 38 bp, Homo Sapiens; identical to SEQ ID NO: 13731

SEQ ID NO: 59657 - DNA, 44 bp, Homo Sapiens; identical to SEQ ID NO: 14399

SEQ ID NO: 59658 - DNA, 16 bp, Homo Sapiens
cttaatctcagggtcg

SEQ ID NO: 59659 - DNA, 33 bp, Homo Sapiens; identical to SEQ ID NO: 14500

SEQ ID NO: 59660 - DNA, 33 bp, Homo Sapiens; identical to SEQ ID NO: 15287

SEQ ID NO: 59661 - DNA, 43 bp, Homo Sapiens; identical to SEQ ID NO: 16845

SEQ ID NO: 59662 - DNA, 46 bp, Homo Sapiens; identical to SEQ ID NO: 17021

SEQ ID NO: 59663 - DNA, 32 bp, Homo Sapiens; identical to SEQ ID NO: 17143

SEQ ID NO: 59664 - DNA, 33 bp, Homo Sapiens; identical to SEQ ID NO: 18221

SEQ ID NO: 59665 - DNA, 17 bp, Homo Sapiens
ggggttcgattccttcc

SEQ ID NO: 59666 - DNA, 40 bp, Homo Sapiens; identical to SEQ ID NO: 19243

SEQ ID NO: 59667 - DNA, 34 bp, Homo Sapiens; identical to SEQ ID NO: 20409

SEQ ID NO: 59668 - DNA, 36 bp, Homo Sapiens; identical to SEQ ID NO: 20623

SEQ ID NO: 59669 - DNA, 34 bp, Homo Sapiens; identical to SEQ ID NO: 20815

SEQ ID NO: 59670 - DNA, 31 bp, Homo Sapiens; identical to SEQ ID NO: 22605

SEQ ID NO: 59671 - DNA, 16 bp, Homo Sapiens
taactagttttgacaa

SEQ ID NO: 59672 - DNA, 41 bp, Homo Sapiens; identical to SEQ ID NO: 23279

SEQ ID NO: 59673 - DNA, 26 bp, Homo Sapiens
taatggtggagttaaagactttttct

SEQ ID NO: 59674 - DNA, 37 bp, Homo Sapiens; identical to SEQ ID NO: 24085

SEQ ID NO: 59675 - DNA, 35 bp, Homo Sapiens; identical to SEQ ID NO: 24904

SEQ ID NO: 59676 - DNA, 34 bp, Homo Sapiens; identical to SEQ ID NO: 25300

SEQ ID NO: 59677 - DNA, 37 bp, Homo Sapiens; identical to SEQ ID NO: 26409

SEQ ID NO: 59678 - DNA, 26 bp, Homo Sapiens
tgaattgcaaattcgaagaagcagct

SEQ ID NO: 59679 - DNA, 31 bp, Homo Sapiens; identical to SEQ ID NO: 28341

SEQ ID NO: 59680 - DNA, 17 bp, Homo Sapiens
ttaactagttttgacaa

SEQ ID NO: 59681 - DNA, 28 bp, Homo Sapiens
ttaacttccaattaactagttttgacaa

SEQ ID NO: 59682 - DNA, 38 bp, Homo Sapiens; identical to SEQ ID NO: 28996

SEQ ID NO: 59683 - DNA, 35 bp, Homo Sapiens; identical to SEQ ID NO: 29550

SEQ ID NO: 59684 - DNA, 27 bp, Homo Sapiens
ttggtggttcgatcccacccagggacg

SEQ ID NO: 59685 - DNA, 28 bp, Homo Sapiens
ttttgacaacattcaaaaaagagtacca

SEQ ID NO: 59686 - DNA, 24 bp, Homo Sapiens
caacttaacttgaccgctctgacc

SEQ ID NO: 59687 - DNA, 21 bp, Homo Sapiens
ttaaagactttttctctgacc

SEQ ID NO: 59688 - DNA, 25 bp, Homo Sapiens
tcaacttaacttgaccgctctgacc

SEQ ID NO: 59689 - DNA, 17 bp, Homo Sapiens
tccgggtgccccctcca

SEQ ID NO: 59690 - DNA, 27 bp, Homo Sapiens
tttcaacttaacttgaccgctctgacc

SEQ ID NO: 59691 - DNA, 30 bp, Homo Sapiens; identical to SEQ ID NO: 27558

SEQ ID NO: 59692 - DNA, 20 bp, Homo Sapiens
gcatgggtggttcagtggta

SEQ ID NO: 59693 - DNA, 17 bp, Homo Sapiens
tcacgtcggggtcacca

SEQ ID NO: 59694 - DNA, 21 bp, Homo Sapiens
gcgttcaggtcgcagtctccc

SEQ ID NO: 59695 - DNA, 16 bp, Homo Sapiens
caacttaacttgaccg

SEQ ID NO: 59696 - DNA, 25 bp, Homo Sapiens
tccctggtggtctagtggttaggat

SEQ ID NO: 59697 - DNA, 27 bp, Homo Sapiens
ctggactctgaatccagcgatccgagt

SEQ ID NO: 59698 - DNA, 27 bp, Homo Sapiens
atttcaacttaacttgaccgctctgac

SEQ ID NO: 59699 - DNA, 26 bp, Homo Sapiens
gtggttgtagtccgtgcgagaatacc

SEQ ID NO: 59700 - DNA, 23 bp, Homo Sapiens
gtcgtggttgtagtccgtgcgag

SEQ ID NO: 59701 - DNA, 24 bp, Homo Sapiens
gcgttggtggtatagtggttagca

SEQ ID NO: 59702 - DNA, 28 bp, Homo Sapiens
gagaaccaacacctctttacagtgacca

SEQ ID NO: 59703 - DNA, 21 bp, Homo Sapiens
tcgaatccgagtcacggcacc

SEQ ID NO: 59704 - DNA, 28 bp, Homo Sapiens
gcgttggtggtatagtggtaagcatagc

SEQ ID NO: 59705 - DNA, 20 bp, Homo Sapiens
gggggtatagctcagtggta

SEQ ID NO: 59706 - DNA, 23 bp, Homo Sapiens
tccctggtggtctagtggctagg

SEQ ID NO: 59707 - DNA, 30 bp, Homo Sapiens; identical to SEQ ID NO: 22220

SEQ ID NO: 59708 - DNA, 29 bp, Homo Sapiens
ggttccatagtgtagcggttatcacgtct

SEQ ID NO: 59709 - DNA, 27 bp, Homo Sapiens
tcattggtcgtggttgtagtccgtgcg

SEQ ID NO: 59710 - DNA, 32 bp, Homo Sapiens; identical to SEQ ID NO: 16829

SEQ ID NO: 59711 - DNA, 30 bp, Homo Sapiens; identical to SEQ ID NO: 24039

SEQ ID NO: 59712 - DNA, 32 bp, Homo Sapiens; identical to SEQ ID NO: 30379

SEQ ID NO: 59713 - DNA, 32 bp, Homo Sapiens; identical to SEQ ID NO: 25478

SEQ ID NO: 59714 - DNA, 25 bp, Homo Sapiens
gtcgtggttgtagtccgtgcgagaa

SEQ ID NO: 59715 - DNA, 30 bp, Homo Sapiens; identical to SEQ ID NO: 7529

SEQ ID NO: 59716 - DNA, 31 bp, Homo Sapiens; identical to SEQ ID NO: 30378

SEQ ID NO: 59717 - DNA, 21 bp, Homo Sapiens
ggattcggcgctctcaccgcc

SEQ ID NO: 59718 - DNA, 32 bp, Homo Sapiens; identical to SEQ ID NO: 6406

SEQ ID NO: 59719 - DNA, 17 bp, Homo Sapiens
gaaaaagtcatggaggc

SEQ ID NO: 59720 - DNA, 22 bp, Homo Sapiens
ttggtggttcagtggtagaatt

SEQ ID NO: 59721 - DNA, 28 bp, Homo Sapiens
tggtagaattctcgcctgccacgcggga

SEQ ID NO: 59722 - DNA, 32 bp, Homo Sapiens; identical to SEQ ID NO: 10377

SEQ ID NO: 59723 - DNA, 36 bp, Homo Sapiens; identical to SEQ ID NO: 7568

SEQ ID NO: 59724 - DNA, 24 bp, Homo Sapiens
gtctagcggttaggattcctggtt

SEQ ID NO: 59725 - DNA, 21 bp, Homo Sapiens
aagtgtttgtgggtttaagtc

SEQ ID NO: 59726 - DNA, 18 bp, Homo Sapiens
gctctcaccgccgcggcc

SEQ ID NO: 59727 - DNA, 30 bp, Homo Sapiens; identical to SEQ ID NO: 27917

SEQ ID NO: 59728 - DNA, 28 bp, Homo Sapiens
atggttagcactctggactttgaatcca

SEQ ID NO: 59729 - DNA, 18 bp, Homo Sapiens
atagctcagtcggtagag

SEQ ID NO: 59730 - DNA, 26 bp, Homo Sapiens
tccctggtggtctagtggctaggatt

SEQ ID NO: 59731 - DNA, 30 bp, Homo Sapiens; identical to SEQ ID NO: 16459

SEQ ID NO: 59732 - DNA, 22 bp, Homo Sapiens
aagattaagagaaccaacacct

SEQ ID NO: 59733 - DNA, 38 bp, Homo Sapiens; identical to SEQ ID NO: 19700

SEQ ID NO: 59734 - DNA, 25 bp, Homo Sapiens
gaggcttacgaccccttatttaccc

SEQ ID NO: 59735 - DNA, 23 bp, Homo Sapiens
tgctaatggtggagttaaagact

SEQ ID NO: 59736 - DNA, 21 bp, Homo Sapiens
tagtggttatcacgtctgctt

SEQ ID NO: 59737 - DNA, 19 bp, Homo Sapiens
aggattcggcgctctcacc

SEQ ID NO: 59738 - DNA, 17 bp, Homo Sapiens
cgccgctggtgtagtgg

SEQ ID NO: 59739 - DNA, 25 bp, Homo Sapiens
tcgtggttgtagtccgtgcgagaat

SEQ ID NO: 59740 - DNA, 30 bp, Homo Sapiens; identical to SEQ ID NO: 24958

SEQ ID NO: 59741 - DNA, 29 bp, Homo Sapiens
ataggagcttaaacccccttatttctacc

SEQ ID NO: 59742 - DNA, 18 bp, Homo Sapiens
atacccttcccgtactac

SEQ ID NO: 59743 - DNA, 25 bp, Homo Sapiens
gctagctcagtcggtagagcatgag

SEQ ID NO: 59744 - DNA, 18 bp, Homo Sapiens
aattttggtgcaactcca

SEQ ID NO: 59745 - DNA, 16 bp, Homo Sapiens
acctctttacagtgac

SEQ ID NO: 59746 - DNA, 44 bp, Homo Sapiens; identical to SEQ ID NO: 7610

SEQ ID NO: 59747 - DNA, 42 bp, Homo Sapiens; identical to SEQ ID NO: 14797

SEQ ID NO: 59748 - DNA, 26 bp, Homo Sapiens
tggtgtagtggtatcatgcaagattc

SEQ ID NO: 59749 - DNA, 20 bp, Homo Sapiens
catcagattgtgaatctgac

SEQ ID NO: 59750 - DNA, 19 bp, Homo Sapiens
tcgaatccggctcgaagga

SEQ ID NO: 59751 - DNA, 39 bp, Homo Sapiens; identical to SEQ ID NO: 3227

SEQ ID NO: 59752 - DNA, 35 bp, Homo Sapiens; identical to SEQ ID NO: 6892

SEQ ID NO: 59753 - DNA, 24 bp, Homo Sapiens
aaagctcacaagaactgctaactc

SEQ ID NO: 59754 - DNA, 16 bp, Homo Sapiens
aaacatcagattgtga

SEQ ID NO: 59755 - DNA, 34 bp, Homo Sapiens; identical to SEQ ID NO: 7600

SEQ ID NO: 59756 - DNA, 34 bp, Homo Sapiens; identical to SEQ ID NO: 2160

SEQ ID NO: 59757 - DNA, 23 bp, Homo Sapiens
agacgggctcacatcaccccata

SEQ ID NO: 59758 - DNA, 32 bp, Homo Sapiens; identical to SEQ ID NO: 19919

SEQ ID NO: 59759 - DNA, 37 bp, Homo Sapiens; identical to SEQ ID NO: 31109

SEQ ID NO: 59760 - DNA, 43 bp, Homo Sapiens; identical to SEQ ID NO: 17864

SEQ ID NO: 59761 - DNA, 17 bp, Homo Sapiens
aagttctggtctccgga

SEQ ID NO: 59762 - DNA, 38 bp, Homo Sapiens; identical to SEQ ID NO: 16291

SEQ ID NO: 59763 - DNA, 32 bp, Homo Sapiens; identical to SEQ ID NO: 18633

SEQ ID NO: 59764 - DNA, 24 bp, Homo Sapiens
ggttcgattcccggccaatgcacc

SEQ ID NO: 59765 - DNA, 28 bp, Homo Sapiens
acagaggcttacgaccccttatttaccc

SEQ ID NO: 59766 - DNA, 29 bp, Homo Sapiens
agcagttgacccgggttcgattcccggcc

SEQ ID NO: 59767 - DNA, 22 bp, Homo Sapiens
agctttggggggttcgattcct

SEQ ID NO: 59768 - DNA, 30 bp, Homo Sapiens; identical to SEQ ID NO: 8278

SEQ ID NO: 59769 - DNA, 42 bp, Homo Sapiens; identical to SEQ ID NO: 23280

SEQ ID NO: 59770 - DNA, 36 bp, Homo Sapiens; identical to SEQ ID NO: 23695

SEQ ID NO: 59771 - DNA, 22 bp, Homo Sapiens
caacacctctttacagtgacca

SEQ ID NO: 59772 - DNA, 17 bp, Homo Sapiens
ctcccggtgtgggaacc

SEQ ID NO: 59773 - DNA, 17 bp, Homo Sapiens
ctccaaataaaagtacc

SEQ ID NO: 59774 - DNA, 18 bp, Homo Sapiens
actccaaataaaagtacc

SEQ ID NO: 59775 - DNA, 20 bp, Homo Sapiens
gataatcatatttaccaacc

SEQ ID NO: 59776 - DNA, 18 bp, Homo Sapiens
aaaccggagatgaaaacc

SEQ ID NO: 59777 - DNA, 33 bp, Homo Sapiens; identical to SEQ ID NO: 1052

SEQ ID NO: 59778 - DNA, 33 bp, Homo Sapiens; identical to SEQ ID NO: 1625

SEQ ID NO: 59779 - DNA, 33 bp, Homo Sapiens; identical to SEQ ID NO: 2572

SEQ ID NO: 59780 - DNA, 29 bp, Homo Sapiens
acaggagatcctgggttcgaatcccagcg

SEQ ID NO: 59781 - DNA, 32 bp, Homo Sapiens; identical to SEQ ID NO: 3076

SEQ ID NO: 59782 - DNA, 39 bp, Homo Sapiens; identical to SEQ ID NO: 3083

SEQ ID NO: 59783 - DNA, 36 bp, Homo Sapiens; identical to SEQ ID NO: 4000

SEQ ID NO: 59784 - DNA, 29 bp, Homo Sapiens
agcactctggactttgaatccagcgatcc

SEQ ID NO: 59785 - DNA, 33 bp, Homo Sapiens; identical to SEQ ID NO: 4660

SEQ ID NO: 59786 - DNA, 36 bp, Homo Sapiens; identical to SEQ ID NO: 4924

SEQ ID NO: 59787 - DNA, 39 bp, Homo Sapiens; identical to SEQ ID NO: 5421

SEQ ID NO: 59788 - DNA, 25 bp, Homo Sapiens
atcctgggttcgaatcccagcggtg

SEQ ID NO: 59789 - DNA, 17 bp, Homo Sapiens
attagaatcttagcttt

SEQ ID NO: 59790 - DNA, 38 bp, Homo Sapiens; identical to SEQ ID NO: 7403

SEQ ID NO: 59791 - DNA, 46 bp, Homo Sapiens; identical to SEQ ID NO: 8234

SEQ ID NO: 59792 - DNA, 44 bp, Homo Sapiens; identical to SEQ ID NO: 8797

SEQ ID NO: 59793 - DNA, 29 bp, Homo Sapiens
cagctaaataagctatcgggcccataccc

SEQ ID NO: 59794 - DNA, 32 bp, Homo Sapiens; identical to SEQ ID NO: 9679

SEQ ID NO: 59795 - DNA, 35 bp, Homo Sapiens; identical to SEQ ID NO: 9802

SEQ ID NO: 59796 - DNA, 18 bp, Homo Sapiens
ccaagcagttgacccggg

SEQ ID NO: 59797 - DNA, 17 bp, Homo Sapiens
ccagagtgtagcttaac

SEQ ID NO: 59798 - DNA, 19 bp, Homo Sapiens
cccataccccgaaaatgtt

SEQ ID NO: 59799 - DNA, 32 bp, Homo Sapiens; identical to SEQ ID NO: 10582

SEQ ID NO: 59800 - DNA, 32 bp, Homo Sapiens; identical to SEQ ID NO: 10829

SEQ ID NO: 59801 - DNA, 38 bp, Homo Sapiens; identical to SEQ ID NO: 12098

SEQ ID NO: 59802 - DNA, 23 bp, Homo Sapiens
cggcccgggttcgactcccggtg

SEQ ID NO: 59803 - DNA, 26 bp, Homo Sapiens
cggtagagcatgggactcttaatccc

SEQ ID NO: 59804 - DNA, 32 bp, Homo Sapiens; identical to SEQ ID NO: 13255

SEQ ID NO: 59805 - DNA, 19 bp, Homo Sapiens
cttaattaaagtggctgat

SEQ ID NO: 59806 - DNA, 46 bp, Homo Sapiens; identical to SEQ ID NO: 14566

SEQ ID NO: 59807 - DNA, 39 bp, Homo Sapiens; identical to SEQ ID NO: 14693

SEQ ID NO: 59808 - DNA, 48 bp, Homo Sapiens; identical to SEQ ID NO: 14981

SEQ ID NO: 59809 - DNA, 29 bp, Homo Sapiens
gaaggctgcgtgttcgaatcacgtcgggg

SEQ ID NO: 59810 - DNA, 26 bp, Homo Sapiens
gaattgcaaattcgaagaagcagctt

SEQ ID NO: 59811 - DNA, 32 bp, Homo Sapiens; identical to SEQ ID NO: 15801

SEQ ID NO: 59812 - DNA, 39 bp, Homo Sapiens; identical to SEQ ID NO: 16062

SEQ ID NO: 59813 - DNA, 34 bp, Homo Sapiens; identical to SEQ ID NO: 16184

SEQ ID NO: 59814 - DNA, 34 bp, Homo Sapiens; identical to SEQ ID NO: 16913

SEQ ID NO: 59815 - DNA, 34 bp, Homo Sapiens; identical to SEQ ID NO: 17216

SEQ ID NO: 59816 - DNA, 37 bp, Homo Sapiens; identical to SEQ ID NO: 17342

SEQ ID NO: 59817 - DNA, 48 bp, Homo Sapiens; identical to SEQ ID NO: 18379

SEQ ID NO: 59818 - DNA, 33 bp, Homo Sapiens; identical to SEQ ID NO: 18417

SEQ ID NO: 59819 - DNA, 34 bp, Homo Sapiens; identical to SEQ ID NO: 18791

SEQ ID NO: 59820 - DNA, 18 bp, Homo Sapiens
gggttcgattcccggtca

SEQ ID NO: 59821 - DNA, 34 bp, Homo Sapiens; identical to SEQ ID NO: 19196

SEQ ID NO: 59822 - DNA, 35 bp, Homo Sapiens; identical to SEQ ID NO: 19221

SEQ ID NO: 59823 - DNA, 16 bp, Homo Sapiens
gtcccttcgtggtcgc

SEQ ID NO: 59824 - DNA, 35 bp, Homo Sapiens; identical to SEQ ID NO: 23054

SEQ ID NO: 59825 - DNA, 24 bp, Homo Sapiens
taagttgcaatacttaatttctgc

SEQ ID NO: 59826 - DNA, 33 bp, Homo Sapiens; identical to SEQ ID NO: 23655

SEQ ID NO: 59827 - DNA, 33 bp, Homo Sapiens; identical to SEQ ID NO: 23692

SEQ ID NO: 59828 - DNA, 32 bp, Homo Sapiens; identical to SEQ ID NO: 23721

SEQ ID NO: 59829 - DNA, 21 bp, Homo Sapiens
tcaaagttaaattataggcta

SEQ ID NO: 59830 - DNA, 37 bp, Homo Sapiens; identical to SEQ ID NO: 24900

SEQ ID NO: 59831 - DNA, 28 bp, Homo Sapiens
tcccgggttcgatccccagcatctccac

SEQ ID NO: 59832 - DNA, 27 bp, Homo Sapiens
tcctgagttcgagcctcagagagggca

SEQ ID NO: 59833 - DNA, 26 bp, Homo Sapiens
tgaaaatgtttagacgggctcacatc

SEQ ID NO: 59834 - DNA, 45 bp, Homo Sapiens; identical to SEQ ID NO: 28053

SEQ ID NO: 59835 - DNA, 44 bp, Homo Sapiens; identical to SEQ ID NO: 28348

SEQ ID NO: 59836 - DNA, 35 bp, Homo Sapiens; identical to SEQ ID NO: 28571

SEQ ID NO: 59837 - DNA, 16 bp, Homo Sapiens
ttcggcgctctcaccg

SEQ ID NO: 59838 - DNA, 30 bp, Homo Sapiens; identical to SEQ ID NO: 30647

SEQ ID NO: 59839 - DNA, 26 bp, Homo Sapiens
tttgatagagtaaataataggagctt

SEQ ID NO: 59840 - DNA, 28 bp, Homo Sapiens
attggtcgtggttgtagtccgtgcgaga

SEQ ID NO: 59841 - DNA, 29 bp, Homo Sapiens
gatttcaacttaacttgaccgctctgacc

SEQ ID NO: 59842 - DNA, 24 bp, Homo Sapiens
gttcgattccccgacggggagcca

SEQ ID NO: 59843 - DNA, 19 bp, Homo Sapiens
ttaacttgaccgctctgac

SEQ ID NO: 59844 - DNA, 18 bp, Homo Sapiens
tccccagtacctccacca

SEQ ID NO: 59845 - DNA, 20 bp, Homo Sapiens
gatttcaacttaacttgacc

SEQ ID NO: 59846 - DNA, 24 bp, Homo Sapiens
gggggtatagctcagtggtagagc

SEQ ID NO: 59847 - DNA, 22 bp, Homo Sapiens
ggttcgattccccgacggggag

SEQ ID NO: 59848 - DNA, 25 bp, Homo Sapiens
ttcaacttaacttgaccgctctgac

SEQ ID NO: 59849 - DNA, 22 bp, Homo Sapiens
gttcgattcccggtcagggaac

SEQ ID NO: 59850 - DNA, 16 bp, Homo Sapiens
cccagcatctccacca

SEQ ID NO: 59851 - DNA, 17 bp, Homo Sapiens
attggtcgtggttgtag

SEQ ID NO: 59852 - DNA, 16 bp, Homo Sapiens
agactttttctctgac

SEQ ID NO: 59853 - DNA, 21 bp, Homo Sapiens
agcactctggactctgaatcc

SEQ ID NO: 59854 - DNA, 21 bp, Homo Sapiens
gtagtccgtgcgagaatacca

SEQ ID NO: 59855 - DNA, 25 bp, Homo Sapiens
tcgtatagtggttagtactctgcgt

SEQ ID NO: 59856 - DNA, 22 bp, Homo Sapiens
cttacgaccccttatttacccc

SEQ ID NO: 59857 - DNA, 25 bp, Homo Sapiens
tggtcgtggttgtagtccgtgcgag

SEQ ID NO: 59858 - DNA, 24 bp, Homo Sapiens
tggttaggattcggcgctctcacc

SEQ ID NO: 59859 - DNA, 25 bp, Homo Sapiens
ggctcacatcaccccataaacacca

SEQ ID NO: 59860 - DNA, 28 bp, Homo Sapiens
gtttccgtagtgtagcggttatcacatt

SEQ ID NO: 59861 - DNA, 28 bp, Homo Sapiens
cattggtcgtggttgtagtccgtgcgag

SEQ ID NO: 59862 - DNA, 28 bp, Homo Sapiens
gccgtgatcgtatagtggttagtactct

SEQ ID NO: 59863 - DNA, 25 bp, Homo Sapiens
tggttgtagtccgtgcgagaatacc

SEQ ID NO: 59864 - DNA, 25 bp, Homo Sapiens
tgccgtgatcgtatagtggttagta

SEQ ID NO: 59865 - DNA, 29 bp, Homo Sapiens
gattgtgaatctgacaacagaggcttacg

SEQ ID NO: 59866 - DNA, 18 bp, Homo Sapiens
aacatggctttctcacca

SEQ ID NO: 59867 - DNA, 29 bp, Homo Sapiens
tgccgtgatcgtatagtggttagtactct

SEQ ID NO: 59868 - DNA, 27 bp, Homo Sapiens
caggggttaggcctctttttaccacca

SEQ ID NO: 59869 - DNA, 16 bp, Homo Sapiens
gcatgggtggttcagt

SEQ ID NO: 59870 - DNA, 22 bp, Homo Sapiens
gttatacccttcccgtactacc

SEQ ID NO: 59871 - DNA, 18 bp, Homo Sapiens
cgaccccttatttacccc

SEQ ID NO: 59872 - DNA, 25 bp, Homo Sapiens
ttggttatacccttcccgtactacc

SEQ ID NO: 59873 - DNA, 19 bp, Homo Sapiens
ggccctatagctcaggggt

SEQ ID NO: 59874 - DNA, 30 bp, Homo Sapiens; identical to SEQ ID NO: 10275

SEQ ID NO: 59875 - DNA, 22 bp, Homo Sapiens
ctagcggttaggattcctggtt

SEQ ID NO: 59876 - DNA, 17 bp, Homo Sapiens
gttcttgtagttgaaat

SEQ ID NO: 59877 - DNA, 16 bp, Homo Sapiens
cctctttacagtgacc

SEQ ID NO: 59878 - DNA, 21 bp, Homo Sapiens
tagcggttaggattcctggtt

SEQ ID NO: 59879 - DNA, 29 bp, Homo Sapiens
gtccttgtagtataaactaatacaccagt

SEQ ID NO: 59880 - DNA, 25 bp, Homo Sapiens
gagcttaaacccccttatttctacc

SEQ ID NO: 59881 - DNA, 19 bp, Homo Sapiens
ggttcgattcccggtcagg

SEQ ID NO: 59882 - DNA, 23 bp, Homo Sapiens
ctcgcctgccacgcgggaggccc

SEQ ID NO: 59883 - DNA, 31 bp, Homo Sapiens; identical to SEQ ID NO: 2233

SEQ ID NO: 59884 - DNA, 27 bp, Homo Sapiens
ggagcttaaacccccttatttctacca

SEQ ID NO: 59885 - DNA, 26 bp, Homo Sapiens
attcggcgctctcaccgccgcggccc

SEQ ID NO: 59886 - DNA, 33 bp, Homo Sapiens; identical to SEQ ID NO: 24474

SEQ ID NO: 59887 - DNA, 31 bp, Homo Sapiens; identical to SEQ ID NO: 9764

SEQ ID NO: 59888 - DNA, 26 bp, Homo Sapiens
ggagcttaaacccccttatttctacc

SEQ ID NO: 59889 - DNA, 23 bp, Homo Sapiens
gttcgagccccacgttgggcgcc

SEQ ID NO: 59890 - DNA, 30 bp, Homo Sapiens; identical to SEQ ID NO: 18425

SEQ ID NO: 59891 - DNA, 24 bp, Homo Sapiens
cgtggttgtagtccgtgcgagaat

SEQ ID NO: 59892 - DNA, 18 bp, Homo Sapiens
aaaatgtttagacgggct

SEQ ID NO: 59893 - DNA, 17 bp, Homo Sapiens
ggttaggattcctggtt

SEQ ID NO: 59894 - DNA, 22 bp, Homo Sapiens
tcgtggttgtagtccgtgcgag

SEQ ID NO: 59895 - DNA, 33 bp, Homo Sapiens; identical to SEQ ID NO: 2980

SEQ ID NO: 59896 - DNA, 22 bp, Homo Sapiens
ttaaccgaaaggttggtggttc

SEQ ID NO: 59897 - DNA, 36 bp, Homo Sapiens; identical to SEQ ID NO: 22459

SEQ ID NO: 59898 - DNA, 26 bp, Homo Sapiens
tggtagaattctcgcctgccacgcgg

SEQ ID NO: 59899 - DNA, 33 bp, Homo Sapiens; identical to SEQ ID NO: 20366

SEQ ID NO: 59900 - DNA, 17 bp, Homo Sapiens
ttcaaaaaagagtacca

SEQ ID NO: 59901 - DNA, 28 bp, Homo Sapiens
atgttggttatacccttcccgtactacc

SEQ ID NO: 59902 - DNA, 31 bp, Homo Sapiens; identical to SEQ ID NO: 23440

SEQ ID NO: 59903 - DNA, 26 bp, Homo Sapiens
gaggcttacgaccccttatttacccc

SEQ ID NO: 59904 - DNA, 24 bp, Homo Sapiens
ggttcgattccttccttttttgcc

SEQ ID NO: 59905 - DNA, 16 bp, Homo Sapiens
ctagctcagtcggtag

SEQ ID NO: 59906 - DNA, 17 bp, Homo Sapiens
gggggtatagctcagtg

SEQ ID NO: 59907 - DNA, 19 bp, Homo Sapiens
aacacctctttacagtgac

SEQ ID NO: 59908 - DNA, 17 bp, Homo Sapiens
gctctcaccgccgcggc

SEQ ID NO: 59909 - DNA, 22 bp, Homo Sapiens
gttgcaatacttaatttctgcc

SEQ ID NO: 59910 - DNA, 19 bp, Homo Sapiens
caagaactgctaactcatg

SEQ ID NO: 59911 - DNA, 31 bp, Homo Sapiens; identical to SEQ ID NO: 9621

SEQ ID NO: 59912 - DNA, 24 bp, Homo Sapiens
gctttgcacgtatgaggccccggg

SEQ ID NO: 59913 - DNA, 17 bp, Homo Sapiens
ctttttccaaggacacc

SEQ ID NO: 59914 - DNA, 20 bp, Homo Sapiens
ctgtcacgcgggagaccggg

SEQ ID NO: 59915 - DNA, 23 bp, Homo Sapiens
gtggggttttgcagtccttacca

SEQ ID NO: 59916 - DNA, 25 bp, Homo Sapiens
aggcttacgaccccttatttacccc

SEQ ID NO: 59917 - DNA, 20 bp, Homo Sapiens
taaacccccttatttctacc

SEQ ID NO: 59918 - DNA, 31 bp, Homo Sapiens; identical to SEQ ID NO: 6209

SEQ ID NO: 59919 - DNA, 16 bp, Homo Sapiens
gttcgattccccgacg

SEQ ID NO: 59920 - DNA, 22 bp, Homo Sapiens
caacttacacttaggagatttc

SEQ ID NO: 59921 - DNA, 21 bp, Homo Sapiens
aagaactgctaactcatgccc

SEQ ID NO: 59922 - DNA, 20 bp, Homo Sapiens
cattggtggttcagtggtag

SEQ ID NO: 59923 - DNA, 28 bp, Homo Sapiens
acaggggttaggcctctttttaccacca

SEQ ID NO: 59924 - DNA, 19 bp, Homo Sapiens
ggtggagttaaagactttt

SEQ ID NO: 59925 - DNA, 20 bp, Homo Sapiens
gctgagtgaagcattggact

SEQ ID NO: 59926 - DNA, 19 bp, Homo Sapiens
tcaaacctgccggggcttc

SEQ ID NO: 59927 - DNA, 30 bp, Homo Sapiens; identical to SEQ ID NO: 10904

SEQ ID NO: 59928 - DNA, 17 bp, Homo Sapiens
gtatgattctcggtttg

SEQ ID NO: 59929 - DNA, 34 bp, Homo Sapiens; identical to SEQ ID NO: 9767

SEQ ID NO: 59930 - DNA, 38 bp, Homo Sapiens; identical to SEQ ID NO: 24479

SEQ ID NO: 59931 - DNA, 17 bp, Homo Sapiens
cttaggtcgctggttcg

SEQ ID NO: 59932 - DNA, 22 bp, Homo Sapiens
gttgatgcagagtggggttttg

SEQ ID NO: 59933 - DNA, 38 bp, Homo Sapiens; identical to SEQ ID NO: 16645

SEQ ID NO: 59934 - DNA, 28 bp, Homo Sapiens
gacaggggttaggcctctttttaccacc

SEQ ID NO: 59935 - DNA, 19 bp, Homo Sapiens
gtggttatcacgtctgctt

SEQ ID NO: 59936 - DNA, 37 bp, Homo Sapiens; identical to SEQ ID NO: 24478

SEQ ID NO: 59937 - DNA, 24 bp, Homo Sapiens
tgggttcgattctcatagtcctag

SEQ ID NO: 59938 - DNA, 41 bp, Homo Sapiens; identical to SEQ ID NO: 215

SEQ ID NO: 59939 - DNA, 40 bp, Homo Sapiens; identical to SEQ ID NO: 214

SEQ ID NO: 59940 - DNA, 28 bp, Homo Sapiens
tcatatcattggtcgtggttgtagtccg

SEQ ID NO: 59941 - DNA, 25 bp, Homo Sapiens
aagttgcaatacttaatttctgcca

SEQ ID NO: 59942 - DNA, 20 bp, Homo Sapiens
gcctgtcacgcgggagaccg

SEQ ID NO: 59943 - DNA, 22 bp, Homo Sapiens
ttcgatcccgggtttcggcacc

SEQ ID NO: 59944 - DNA, 23 bp, Homo Sapiens
gttcaagtccctgttcgggcgcc

SEQ ID NO: 59945 - DNA, 24 bp, Homo Sapiens
ccctggtggtctagtggttaggat

SEQ ID NO: 59946 - DNA, 40 bp, Homo Sapiens; identical to SEQ ID NO: 25710

SEQ ID NO: 59947 - DNA, 19 bp, Homo Sapiens
tcgatcccgggtttcggca

SEQ ID NO: 59948 - DNA, 19 bp, Homo Sapiens
aaacccccttatttctacc

SEQ ID NO: 59949 - DNA, 19 bp, Homo Sapiens
aacaacatggctttctcac

SEQ ID NO: 59950 - DNA, 18 bp, Homo Sapiens
attggtggttcagtggta

SEQ ID NO: 59951 - DNA, 32 bp, Homo Sapiens; identical to SEQ ID NO: 18449

SEQ ID NO: 59952 - DNA, 36 bp, Homo Sapiens; identical to SEQ ID NO: 8591

SEQ ID NO: 59953 - DNA, 16 bp, Homo Sapiens
atcccaccctcgtcgc

SEQ ID NO: 59954 - DNA, 28 bp, Homo Sapiens
cagaggcttacgaccccttatttacccc

SEQ ID NO: 59955 - DNA, 23 bp, Homo Sapiens
gttcgagtcccatctggggtgcc

SEQ ID NO: 59956 - DNA, 47 bp, Homo Sapiens; identical to SEQ ID NO: 10366

SEQ ID NO: 59957 - DNA, 19 bp, Homo Sapiens
gagaaccaacacctcttta

SEQ ID NO: 59958 - DNA, 22 bp, Homo Sapiens
ggggattagctcaaatggtaga

SEQ ID NO: 59959 - DNA, 41 bp, Homo Sapiens; identical to SEQ ID NO: 23475

SEQ ID NO: 59960 - DNA, 26 bp, Homo Sapiens
caacttacacttaggagatttcaact

SEQ ID NO: 59961 - DNA, 40 bp, Homo Sapiens; identical to SEQ ID NO: 30354

SEQ ID NO: 59962 - DNA, 19 bp, Homo Sapiens
cataatctgaaggtcctga

SEQ ID NO: 59963 - DNA, 16 bp, Homo Sapiens
atctcggtgggacctc

SEQ ID NO: 59964 - DNA, 24 bp, Homo Sapiens
cttaggagatttcaacttaacttg

SEQ ID NO: 59965 - DNA, 41 bp, Homo Sapiens; identical to SEQ ID NO: 23029

SEQ ID NO: 59966 - DNA, 21 bp, Homo Sapiens
tcaggatggccgagcggtcta

SEQ ID NO: 59967 - DNA, 19 bp, Homo Sapiens
aagtcccattggtctagcc

SEQ ID NO: 59968 - DNA, 22 bp, Homo Sapiens
atgtctaacaacatggctttct

SEQ ID NO: 59969 - DNA, 17 bp, Homo Sapiens
tcaccgccgcggcccgg

SEQ ID NO: 59970 - DNA, 26 bp, Homo Sapiens
tccattggggtttccccgcgcaggtt

SEQ ID NO: 59971 - DNA, 25 bp, Homo Sapiens
tcggtagagcatgggactcttaatc

SEQ ID NO: 59972 - DNA, 43 bp, Homo Sapiens; identical to SEQ ID NO: 30593

SEQ ID NO: 59973 - DNA, 26 bp, Homo Sapiens
agtcggtagagcatgagactcttaat

SEQ ID NO: 59974 - DNA, 18 bp, Homo Sapiens
ctgcgtgttcgaatcacg

SEQ ID NO: 59975 - DNA, 19 bp, Homo Sapiens
gggtatgattctcgcttcg

SEQ ID NO: 59976 - DNA, 42 bp, Homo Sapiens; identical to SEQ ID NO: 216

SEQ ID NO: 59977 - DNA, 17 bp, Homo Sapiens
aagacaggggttaggcc

SEQ ID NO: 59978 - DNA, 30 bp, Homo Sapiens; identical to SEQ ID NO: 2977

SEQ ID NO: 59979 - DNA, 43 bp, Homo Sapiens; identical to SEQ ID NO: 17413

SEQ ID NO: 59980 - DNA, 22 bp, Homo Sapiens
gtctcataatctgaaggtcgtg

SEQ ID NO: 59981 - DNA, 25 bp, Homo Sapiens
tctgacaacagaggcttacgacccc

SEQ ID NO: 59982 - DNA, 27 bp, Homo Sapiens
tgcccccatgtctaacaacatggcttt

SEQ ID NO: 59983 - DNA, 28 bp, Homo Sapiens
ttcggcgctctcaccgccgcggcccggg

SEQ ID NO: 59984 - DNA, 33 bp, Homo Sapiens; identical to SEQ ID NO: 949

SEQ ID NO: 59985 - DNA, 18 bp, Homo Sapiens
aatggatagcgcattgga

SEQ ID NO: 59986 - DNA, 29 bp, Homo Sapiens
actaagtgtttgtgggtttaagtcccatt

SEQ ID NO: 59987 - DNA, 46 bp, Homo Sapiens; identical to SEQ ID NO: 3398

SEQ ID NO: 59988 - DNA, 23 bp, Homo Sapiens
cgctctcaccgccgcggcccggg

SEQ ID NO: 59989 - DNA, 46 bp, Homo Sapiens; identical to SEQ ID NO: 17150

SEQ ID NO: 59990 - DNA, 18 bp, Homo Sapiens
gcggcccgggttcgactc

SEQ ID NO: 59991 - DNA, 34 bp, Homo Sapiens; identical to SEQ ID NO: 18726

SEQ ID NO: 59992 - DNA, 35 bp, Homo Sapiens; identical to SEQ ID NO: 18739

SEQ ID NO: 59993 - DNA, 37 bp, Homo Sapiens; identical to SEQ ID NO: 22611

SEQ ID NO: 59994 - DNA, 23 bp, Homo Sapiens
tcaggatggccgagtggtctaag

SEQ ID NO: 59995 - DNA, 26 bp, Homo Sapiens
tgcgtgttcaagtcacgtcggggtca

SEQ ID NO: 59996 - DNA, 20 bp, Homo Sapiens
ttcgagccccagtggaacca

SEQ ID NO: 59997 - DNA, 27 bp, Homo Sapiens
tttgacaacattcaaaaaagagtacca

SEQ ID NO: 59998 - DNA, 24 bp, Homo Sapiens
ggtagcgtggccgagcggtctaag

SEQ ID NO: 59999 - DNA, 17 bp, Homo Sapiens
gcgccgctggtgtagtg

SEQ ID NO: 60000 - DNA, 19 bp, Homo Sapiens
tcgtggttgtagtccgtgc

SEQ ID NO: 60001 - DNA, 16 bp, Homo Sapiens
gaaaaagtcatggagg

SEQ ID NO: 60002 - DNA, 18 bp, Homo Sapiens
gtcaggatggccgagtgg

SEQ ID NO: 60003 - DNA, 23 bp, Homo Sapiens
gtttaagtcccattggtctagcc

SEQ ID NO: 60004 - DNA, 16 bp, Homo Sapiens
cggtagagcatgggac

SEQ ID NO: 60005 - DNA, 17 bp, Homo Sapiens
taggatggggtgtgata

SEQ ID NO: 60006 - DNA, 18 bp, Homo Sapiens
aacccccttatttctacc

SEQ ID NO: 60007 - DNA, 17 bp, Homo Sapiens
atcagattgtgaatctg

SEQ ID NO: 60008 - DNA, 17 bp, Homo Sapiens
gtcaggatggccgagcg

SEQ ID NO: 60009 - DNA, 22 bp, Homo Sapiens
ggttccatagtgtagtggttat

SEQ ID NO: 60010 - DNA, 17 bp, Homo Sapiens
gttcgattcccggtcag

SEQ ID NO: 60011 - DNA, 41 bp, Homo Sapiens; identical to SEQ ID NO: 23351

SEQ ID NO: 60012 - DNA, 31 bp, Homo Sapiens; identical to SEQ ID NO: 12560

SEQ ID NO: 60013 - DNA, 26 bp, Homo Sapiens
ccgggttcgactcccggtgtgggaac

SEQ ID NO: 60014 - DNA, 43 bp, Homo Sapiens; identical to SEQ ID NO: 25210

SEQ ID NO: 60015 - DNA, 26 bp, Homo Sapiens
agggattgtgggttcgagtcccatct

SEQ ID NO: 60016 - DNA, 37 bp, Homo Sapiens; identical to SEQ ID NO: 3146

SEQ ID NO: 60017 - DNA, 36 bp, Homo Sapiens; identical to SEQ ID NO: 2928

SEQ ID NO: 60018 - DNA, 42 bp, Homo Sapiens; identical to SEQ ID NO: 25712

SEQ ID NO: 60019 - DNA, 37 bp, Homo Sapiens; identical to SEQ ID NO: 11954

SEQ ID NO: 60020 - DNA, 40 bp, Homo Sapiens; identical to SEQ ID NO: 24860

SEQ ID NO: 60021 - DNA, 37 bp, Homo Sapiens; identical to SEQ ID NO: 16701

SEQ ID NO: 60022 - DNA, 36 bp, Homo Sapiens; identical to SEQ ID NO: 12244

SEQ ID NO: 60023 - DNA, 16 bp, Homo Sapiens
gttcgattcccgggcg

SEQ ID NO: 60024 - DNA, 38 bp, Homo Sapiens; identical to SEQ ID NO: 931

SEQ ID NO: 60025 - DNA, 43 bp, Homo Sapiens; identical to SEQ ID NO: 15425

SEQ ID NO: 60026 - DNA, 38 bp, Homo Sapiens; identical to SEQ ID NO: 11955

SEQ ID NO: 60027 - DNA, 35 bp, Homo Sapiens; identical to SEQ ID NO: 17115

SEQ ID NO: 60028 - DNA, 38 bp, Homo Sapiens; identical to SEQ ID NO: 7460

SEQ ID NO: 60029 - DNA, 38 bp, Homo Sapiens; identical to SEQ ID NO: 28874

SEQ ID NO: 60030 - DNA, 36 bp, Homo Sapiens; identical to SEQ ID NO: 12228

SEQ ID NO: 60031 - DNA, 16 bp, Homo Sapiens
tcccgggcggcgcacc

SEQ ID NO: 60032 - DNA, 32 bp, Homo Sapiens; identical to SEQ ID NO: 16561

SEQ ID NO: 60033 - DNA, 32 bp, Homo Sapiens; identical to SEQ ID NO: 11098

SEQ ID NO: 60034 - DNA, 38 bp, Homo Sapiens; identical to SEQ ID NO: 27471

SEQ ID NO: 60035 - DNA, 20 bp, Homo Sapiens
agtggttagtactctgcgtt

SEQ ID NO: 60036 - DNA, 24 bp, Homo Sapiens
gcgttcgattcccggtcagggaac

SEQ ID NO: 60037 - DNA, 21 bp, Homo Sapiens
ctagtggttaggattcggcgc

SEQ ID NO: 60038 - DNA, 23 bp, Homo Sapiens
ctagtggttaggattcggcgctc

SEQ ID NO: 60039 - DNA, 39 bp, Homo Sapiens; identical to SEQ ID NO: 1484

SEQ ID NO: 60040 - DNA, 36 bp, Homo Sapiens; identical to SEQ ID NO: 27004

SEQ ID NO: 60041 - DNA, 36 bp, Homo Sapiens; identical to SEQ ID NO: 14223

SEQ ID NO: 60042 - DNA, 37 bp, Homo Sapiens; identical to SEQ ID NO: 17052

SEQ ID NO: 60043 - DNA, 33 bp, Homo Sapiens; identical to SEQ ID NO: 16835

SEQ ID NO: 60044 - DNA, 36 bp, Homo Sapiens; identical to SEQ ID NO: 3161

SEQ ID NO: 60045 - DNA, 39 bp, Homo Sapiens; identical to SEQ ID NO: 3100

SEQ ID NO: 60046 - DNA, 38 bp, Homo Sapiens; identical to SEQ ID NO: 3176

SEQ ID NO: 60047 - DNA, 35 bp, Homo Sapiens; identical to SEQ ID NO: 12243

SEQ ID NO: 60048 - DNA, 34 bp, Homo Sapiens; identical to SEQ ID NO: 13539

SEQ ID NO: 60049 - DNA, 31 bp, Homo Sapiens; identical to SEQ ID NO: 17081

SEQ ID NO: 60050 - DNA, 37 bp, Homo Sapiens; identical to SEQ ID NO: 3162

SEQ ID NO: 60051 - DNA, 33 bp, Homo Sapiens; identical to SEQ ID NO: 12012

SEQ ID NO: 60052 - DNA, 34 bp, Homo Sapiens; identical to SEQ ID NO: 11951

SEQ ID NO: 60053 - DNA, 22 bp, Homo Sapiens
cggaagcgtgctgggcccataa

SEQ ID NO: 60054 - DNA, 17 bp, Homo Sapiens
tctcgctggggcctcca

SEQ ID NO: 60055 - DNA, 17 bp, Homo Sapiens
cccgggcggaaacacca

SEQ ID NO: 60056 - DNA, 38 bp, Homo Sapiens; identical to SEQ ID NO: 33911

SEQ ID NO: 60057 - DNA, 25 bp, Homo Sapiens
gcgggttcgaaccccgtccgtgcct

SEQ ID NO: 60058 - DNA, 29 bp, Homo Sapiens
gtcgctggttcgattccggctcgaaggac

SEQ ID NO: 60059 - DNA, 27 bp, Homo Sapiens
aggcggcccgggttcgactcccggtgt

SEQ ID NO: 60060 - DNA, 22 bp, Homo Sapiens
gggttcgactcccggtatggga

SEQ ID NO: 60061 - DNA, 19 bp, Homo Sapiens
atggataaggcattggcct

SEQ ID NO: 60062 - DNA, 27 bp, Homo Sapiens
tgagggttcgaatcccttcgtggttgc

SEQ ID NO: 60063 - DNA, 17 bp, Homo Sapiens
cagagtggcgcagcgga

SEQ ID NO: 60064 - DNA, 26 bp, Homo Sapiens
cctcggttcgaatccgagtcacggca

SEQ ID NO: 60065 - DNA, 21 bp, Homo Sapiens
gcaatggatagcgcattggac

SEQ ID NO: 60066 - DNA, 40 bp, Homo Sapiens; identical to SEQ ID NO: 11506

SEQ ID NO: 60067 - DNA, 31 bp, Homo Sapiens; identical to SEQ ID NO: 10480

SEQ ID NO: 60068 - DNA, 16 bp, Homo Sapiens
ggttaaggcattggac

SEQ ID NO: 60069 - DNA, 37 bp, Homo Sapiens; identical to SEQ ID NO: 19938

SEQ ID NO: 60070 - DNA, 24 bp, Homo Sapiens
cgggttcgactcccggtatgggaa

SEQ ID NO: 60071 - DNA, 30 bp, Homo Sapiens; identical to SEQ ID NO: 1566

SEQ ID NO: 60072 - DNA, 38 bp, Homo Sapiens; identical to SEQ ID NO: 33917

SEQ ID NO: 60073 - DNA, 31 bp, Homo Sapiens; identical to SEQ ID NO: 31615

SEQ ID NO: 60074 - DNA, 18 bp, Homo Sapiens
aaccccactcctggtacc

SEQ ID NO: 60075 - DNA, 36 bp, Homo Sapiens; identical to SEQ ID NO: 11790

SEQ ID NO: 60076 - DNA, 28 bp, Homo Sapiens
ttgagggttcgaatcccttcgtggttgc

SEQ ID NO: 60077 - DNA, 45 bp, Homo Sapiens; identical to SEQ ID NO: 32206

SEQ ID NO: 60078 - DNA, 25 bp, Homo Sapiens
aggcggcccgggttcgactcccggt

SEQ ID NO: 60079 - DNA, 20 bp, Homo Sapiens
tcgaatcccagtagagcctc

SEQ ID NO: 60080 - DNA, 26 bp, Homo Sapiens
ctggttcgatcccgggtttcggcacc

SEQ ID NO: 60081 - DNA, 32 bp, Homo Sapiens; identical to SEQ ID NO: 17569

SEQ ID NO: 60082 - DNA, 34 bp, Homo Sapiens; identical to SEQ ID NO: 30117

SEQ ID NO: 60083 - DNA, 29 bp, Homo Sapiens
aggatggggtgtgataggtggcacggaga

SEQ ID NO: 60084 - DNA, 25 bp, Homo Sapiens
cgtgttcaaatcacgtcggggtcac

SEQ ID NO: 60085 - DNA, 41 bp, Homo Sapiens; identical to SEQ ID NO: 18202

SEQ ID NO: 60086 - DNA, 16 bp, Homo Sapiens
ggtagagcagaggact

SEQ ID NO: 60087 - DNA, 25 bp, Homo Sapiens
cgcggcccgggttcgattcccggtc

SEQ ID NO: 60088 - DNA, 29 bp, Homo Sapiens
gcgtgggttcgaatcccaccttcgtcgcc

SEQ ID NO: 60089 - DNA, 33 bp, Homo Sapiens; identical to SEQ ID NO: 20345

SEQ ID NO: 60090 - DNA, 28 bp, Homo Sapiens
cgcagaaggtcctgggttcgagccccag

SEQ ID NO: 60091 - DNA, 32 bp, Homo Sapiens; identical to SEQ ID NO: 12458

SEQ ID NO: 60092 - DNA, 37 bp, Homo Sapiens; identical to SEQ ID NO: 36634

SEQ ID NO: 60093 - DNA, 31 bp, Homo Sapiens; identical to SEQ ID NO: 38652

SEQ ID NO: 60094 - DNA, 32 bp, Homo Sapiens; identical to SEQ ID NO: 5157

SEQ ID NO: 60095 - DNA, 16 bp, Homo Sapiens
cgttcggctgttaacc

SEQ ID NO: 60096 - DNA, 43 bp, Homo Sapiens; identical to SEQ ID NO: 41033

SEQ ID NO: 60097 - DNA, 32 bp, Homo Sapiens; identical to SEQ ID NO: 8225

SEQ ID NO: 60098 - DNA, 32 bp, Homo Sapiens; identical to SEQ ID NO: 3777

SEQ ID NO: 60099 - DNA, 23 bp, Homo Sapiens
agcagcttcaaacctgccggggc

SEQ ID NO: 60100 - DNA, 16 bp, Homo Sapiens
ggttcaaatccgggtg

SEQ ID NO: 60101 - DNA, 33 bp, Homo Sapiens; identical to SEQ ID NO: 12208

SEQ ID NO: 60102 - DNA, 25 bp, Homo Sapiens
cggagaattttggattctcagggat

SEQ ID NO: 60103 - DNA, 26 bp, Homo Sapiens
ttaaccgaaaggttggtggttcgagc

SEQ ID NO: 60104 - DNA, 28 bp, Homo Sapiens
agctcacaagaactgctaactcatgccc

SEQ ID NO: 60105 - DNA, 43 bp, Homo Sapiens; identical to SEQ ID NO: 35270

SEQ ID NO: 60106 - DNA, 47 bp, Homo Sapiens; identical to SEQ ID NO: 11328

SEQ ID NO: 60107 - DNA, 29 bp, Homo Sapiens
cgcgggaggcccgggttcgattcccggcc

SEQ ID NO: 60108 - DNA, 24 bp, Homo Sapiens
ggctgttaaccgaaaggttggtgg

SEQ ID NO: 60109 - DNA, 35 bp, Homo Sapiens; identical to SEQ ID NO: 9089

SEQ ID NO: 60110 - DNA, 38 bp, Homo Sapiens; identical to SEQ ID NO: 9926

SEQ ID NO: 60111 - DNA, 46 bp, Homo Sapiens; identical to SEQ ID NO: 14304

SEQ ID NO: 60112 - DNA, 26 bp, Homo Sapiens
gcggaagcgtgctgggcccataaccc

SEQ ID NO: 60113 - DNA, 37 bp, Homo Sapiens; identical to SEQ ID NO: 919

SEQ ID NO: 60114 - DNA, 30 bp, Homo Sapiens; identical to SEQ ID NO: 5130

SEQ ID NO: 60115 - DNA, 36 bp, Homo Sapiens; identical to SEQ ID NO: 29983

SEQ ID NO: 60116 - DNA, 47 bp, Homo Sapiens; identical to SEQ ID NO: 24606

SEQ ID NO: 60117 - DNA, 35 bp, Homo Sapiens; identical to SEQ ID NO: 5027

SEQ ID NO: 60118 - DNA, 31 bp, Homo Sapiens; identical to SEQ ID NO: 27918

SEQ ID NO: 60119 - DNA, 30 bp, Homo Sapiens; identical to SEQ ID NO: 1632

SEQ ID NO: 60120 - DNA, 29 bp, Homo Sapiens
aaaatgttggttatacccttcccgtacta

SEQ ID NO: 60121 - DNA, 31 bp, Homo Sapiens; identical to SEQ ID NO: 2705

SEQ ID NO: 60122 - DNA, 37 bp, Homo Sapiens; identical to SEQ ID NO: 12157

SEQ ID NO: 60123 - DNA, 47 bp, Homo Sapiens; identical to SEQ ID NO: 8720

SEQ ID NO: 60124 - DNA, 21 bp, Homo Sapiens
aggtcgatggatcgaaaccat

SEQ ID NO: 60125 - DNA, 25 bp, Homo Sapiens
attcggcgctctcaccgccgcggcc

SEQ ID NO: 60126 - DNA, 27 bp, Homo Sapiens
gagatgaaaacctttttccaaggacac

SEQ ID NO: 60127 - DNA, 40 bp, Homo Sapiens; identical to SEQ ID NO: 19702

SEQ ID NO: 60128 - DNA, 33 bp, Homo Sapiens; identical to SEQ ID NO: 10094

SEQ ID NO: 60129 - DNA, 23 bp, Homo Sapiens
cataatctgaaggtcctgagttc

SEQ ID NO: 60130 - DNA, 18 bp, Homo Sapiens
cgaatctcggtgggacct

SEQ ID NO: 60131 - DNA, 32 bp, Homo Sapiens
gcgatccgagttcaaatctcggtgggacctcc

SEQ ID NO: 60132 - DNA, 33 bp, Homo Sapiens; identical to SEQ ID NO: 28279

SEQ ID NO: 60133 - DNA, 20 bp, Homo Sapiens
cgagtcccttcgtggtcgcc

SEQ ID NO: 60134 - DNA, 44 bp, Homo Sapiens; identical to SEQ ID NO: 41748

SEQ ID NO: 60135 - DNA, 39 bp, Homo Sapiens; identical to SEQ ID NO: 28285

SEQ ID NO: 60136 - DNA, 16 bp, Homo Sapiens
tagagcatttgactgc

SEQ ID NO: 60137 - DNA, 18 bp, Homo Sapiens
agtggcgcagcggaagcg

SEQ ID NO: 60138 - DNA, 35 bp, Homo Sapiens; identical to SEQ ID NO: 16416

SEQ ID NO: 60139 - DNA, 23 bp, Homo Sapiens
gtatgattctcggtttgggtccg

SEQ ID NO: 60140 - DNA, 36 bp, Homo Sapiens; identical to SEQ ID NO: 6716

SEQ ID NO: 60141 - DNA, 17 bp, Homo Sapiens
cgaaaccgggcggaaac

SEQ ID NO: 60142 - DNA, 35 bp, Homo Sapiens; identical to SEQ ID NO: 24722

SEQ ID NO: 60143 - DNA, 18 bp, Homo Sapiens
aggtcgtgagttcgagcc

SEQ ID NO: 60144 - DNA, 37 bp, Homo Sapiens; identical to SEQ ID NO: 6717

SEQ ID NO: 60145 - DNA, 36 bp, Homo Sapiens; identical to SEQ ID NO: 10916

SEQ ID NO: 60146 - DNA, 27 bp, Homo Sapiens
aggcggcccgggttcgactcccggtgt

SEQ ID NO: 60147 - DNA, 37 bp, Homo Sapiens; identical to SEQ ID NO: 6703

SEQ ID NO: 60148 - DNA, 17 bp, Homo Sapiens
attcggcgctctcaccg

SEQ ID NO: 60149 - DNA, 17 bp, Homo Sapiens
attctcggtttgggtcc

SEQ ID NO: 60150 - DNA, 17 bp, Homo Sapiens
tcgactcctggctggct

SEQ ID NO: 60151 - DNA, 35 bp, Homo Sapiens; identical to SEQ ID NO: 24531

SEQ ID NO: 60152 - DNA, 31 bp, Homo Sapiens; identical to SEQ ID NO: 3852

SEQ ID NO: 60153 - DNA, 36 bp, Homo Sapiens; identical to SEQ ID NO: 6702

SEQ ID NO: 60154 - DNA, 36 bp, Homo Sapiens; identical to SEQ ID NO: 6723

SEQ ID NO: 60155 - DNA, 44 bp, Homo Sapiens; identical to SEQ ID NO: 36502

SEQ ID NO: 60156 - DNA, 27 bp, Homo Sapiens
tccgggttcgagtcccggcggagtcgc

SEQ ID NO: 60157 - DNA, 32 bp, Homo Sapiens; identical to SEQ ID NO: 19351

SEQ ID NO: 60158 - DNA, 34 bp, Homo Sapiens; identical to SEQ ID NO: 35413

SEQ ID NO: 60159 - DNA, 43 bp, Homo Sapiens; identical to SEQ ID NO: 36499

SEQ ID NO: 60160 - DNA, 19 bp, Homo Sapiens
cgattcccggccaacgcac

SEQ ID NO: 60161 - DNA, 31 bp, Homo Sapiens; identical to SEQ ID NO: 13229

SEQ ID NO: 60162 - DNA, 34 bp, Homo Sapiens; identical to SEQ ID NO: 8933

SEQ ID NO: 60163 - DNA, 35 bp, Homo Sapiens; identical to SEQ ID NO: 24537

SEQ ID NO: 60164 - DNA, 34 bp, Homo Sapiens; identical to SEQ ID NO: 40728

SEQ ID NO: 60165 - DNA, 35 bp, Homo Sapiens; identical to SEQ ID NO: 7816

SEQ ID NO: 60166 - DNA, 18 bp, Homo Sapiens
gatcccgggcggaaacac

SEQ ID NO: 60167 - DNA, 20 bp, Homo Sapiens
cgatccccgtacgggccacc

SEQ ID NO: 60168 - DNA, 20 bp, Homo Sapiens
tcgatccccgtacgggccac

SEQ ID NO: 60169 - DNA, 25 bp, Homo Sapiens
acgggttcgaaccccgtccgtgcct

SEQ ID NO: 60170 - DNA, 33 bp, Homo Sapiens; identical to SEQ ID NO: 10190

SEQ ID NO: 60171 - DNA, 34 bp, Homo Sapiens; identical to SEQ ID NO: 8551

SEQ ID NO: 60172 - DNA, 44 bp, Homo Sapiens; identical to SEQ ID NO: 13630

SEQ ID NO: 60173 - DNA, 21 bp, Homo Sapiens
gcgttcgattcccggtcaggg

SEQ ID NO: 60174 - DNA, 35 bp, Homo Sapiens; identical to SEQ ID NO: 26797

SEQ ID NO: 60175 - DNA, 32 bp, Homo Sapiens; identical to SEQ ID NO: 5167

SEQ ID NO: 60176 - DNA, 36 bp, Homo Sapiens; identical to SEQ ID NO: 20597

SEQ ID NO: 60177 - DNA, 45 bp, Homo Sapiens; identical to SEQ ID NO: 42950

SEQ ID NO: 60178 - DNA, 44 bp, Homo Sapiens; identical to SEQ ID NO: 36500

SEQ ID NO: 60179 - DNA, 35 bp, Homo Sapiens; identical to SEQ ID NO: 20587

SEQ ID NO: 60180 - DNA, 33 bp, Homo Sapiens; identical to SEQ ID NO: 24136

SEQ ID NO: 60181 - DNA, 33 bp, Homo Sapiens; identical to SEQ ID NO: 24938

SEQ ID NO: 60182 - DNA, 44 bp, Homo Sapiens; identical to SEQ ID NO: 10204

SEQ ID NO: 60183 - DNA, 28 bp, Homo Sapiens
gatccgagttcaaatctcggtgggacct

SEQ ID NO: 60184 - DNA, 44 bp, Homo Sapiens; identical to SEQ ID NO: 22583

SEQ ID NO: 60185 - DNA, 33 bp, Homo Sapiens; identical to SEQ ID NO: 24951

SEQ ID NO: 60186 - DNA, 38 bp, Homo Sapiens; identical to SEQ ID NO: 27496

SEQ ID NO: 60187 - DNA, 37 bp, Homo Sapiens; identical to SEQ ID NO: 30923

SEQ ID NO: 60188 - DNA, 33 bp, Homo Sapiens; identical to SEQ ID NO: 5217

SEQ ID NO: 60189 - DNA, 29 bp, Homo Sapiens
cccaggcggcccgggttcgactcccggtg

SEQ ID NO: 60190 - DNA, 35 bp, Homo Sapiens; identical to SEQ ID NO: 14222

SEQ ID NO: 60191 - DNA, 33 bp, Homo Sapiens; identical to SEQ ID NO: 37605

SEQ ID NO: 60192 - DNA, 34 bp, Homo Sapiens; identical to SEQ ID NO: 40650

SEQ ID NO: 60193 - DNA, 36 bp, Homo Sapiens; identical to SEQ ID NO: 918

SEQ ID NO: 60194 - DNA, 45 bp, Homo Sapiens; identical to SEQ ID NO: 3509

SEQ ID NO: 60195 - DNA, 38 bp, Homo Sapiens; identical to SEQ ID NO: 12444

SEQ ID NO: 60196 - DNA, 25 bp, Homo Sapiens
gtgttcaagtcacgtcggggtcacc

SEQ ID NO: 60197 - DNA, 33 bp, Homo Sapiens; identical to SEQ ID NO: 24144

SEQ ID NO: 60198 - DNA, 36 bp, Homo Sapiens; identical to SEQ ID NO: 24723

SEQ ID NO: 60199 - DNA, 16 bp, Homo Sapiens
tcccggccactgcacc

SEQ ID NO: 60200 - DNA, 20 bp, Homo Sapiens
tcgaatcctgttcgtgacgc

SEQ ID NO: 60201 - DNA, 34 bp, Homo Sapiens; identical to SEQ ID NO: 29342

SEQ ID NO: 60202 - DNA, 33 bp, Homo Sapiens; identical to SEQ ID NO: 1664

SEQ ID NO: 60203 - DNA, 35 bp, Homo Sapiens; identical to SEQ ID NO: 33804

SEQ ID NO: 60204 - DNA, 35 bp, Homo Sapiens; identical to SEQ ID NO: 8582

SEQ ID NO: 60205 - DNA, 34 bp, Homo Sapiens; identical to SEQ ID NO: 35054

SEQ ID NO: 60206 - DNA, 34 bp, Homo Sapiens; identical to SEQ ID NO: 11965

SEQ ID NO: 60207 - DNA, 40 bp, Homo Sapiens; identical to SEQ ID NO: 36335

SEQ ID NO: 60208 - DNA, 36 bp, Homo Sapiens; identical to SEQ ID NO: 24532

SEQ ID NO: 60209 - DNA, 36 bp, Homo Sapiens; identical to SEQ ID NO: 24647

SEQ ID NO: 60210 - DNA, 36 bp, Homo Sapiens; identical to SEQ ID NO: 24720

SEQ ID NO: 60211 - DNA, 35 bp, Homo Sapiens; identical to SEQ ID NO: 26765

SEQ ID NO: 60212 - DNA, 35 bp, Homo Sapiens; identical to SEQ ID NO: 29703

SEQ ID NO: 60213 - DNA, 18 bp, Homo Sapiens
aaaccgggcagaagcacc

SEQ ID NO: 60214 - DNA, 33 bp, Homo Sapiens; identical to SEQ ID NO: 3746

SEQ ID NO: 60215 - DNA, 32 bp, Homo Sapiens; identical to SEQ ID NO: 5171

SEQ ID NO: 60216 - DNA, 18 bp, Homo Sapiens
atccccgtacgggccacc

SEQ ID NO: 60217 - DNA, 29 bp, Homo Sapiens
atcctgggttcgaatcccagcggtgcctc

SEQ ID NO: 60218 - DNA, 35 bp, Homo Sapiens; identical to SEQ ID NO: 8007

SEQ ID NO: 60219 - DNA, 37 bp, Homo Sapiens; identical to SEQ ID NO: 8107

SEQ ID NO: 60220 - DNA, 34 bp, Homo Sapiens; identical to SEQ ID NO: 8544

SEQ ID NO: 60221 - DNA, 34 bp, Homo Sapiens; identical to SEQ ID NO: 8555

SEQ ID NO: 60222 - DNA, 34 bp, Homo Sapiens; identical to SEQ ID NO: 8833

SEQ ID NO: 60223 - DNA, 30 bp, Homo Sapiens; identical to SEQ ID NO: 34870

SEQ ID NO: 60224 - DNA, 35 bp, Homo Sapiens; identical to SEQ ID NO: 11540

SEQ ID NO: 60225 - DNA, 18 bp, Homo Sapiens
cgaaaccgggcggaaaca

SEQ ID NO: 60226 - DNA, 20 bp, Homo Sapiens
ctaaaccatcctctgctacc

SEQ ID NO: 60227 - DNA, 41 bp, Homo Sapiens; identical to SEQ ID NO: 36336

SEQ ID NO: 60228 - DNA, 34 bp, Homo Sapiens; identical to SEQ ID NO: 14221

SEQ ID NO: 60229 - DNA, 34 bp, Homo Sapiens; identical to SEQ ID NO: 14594

SEQ ID NO: 60230 - DNA, 37 bp, Homo Sapiens; identical to SEQ ID NO: 14763

SEQ ID NO: 60231 - DNA, 18 bp, Homo Sapiens
gaaaccgggcagaagcac

SEQ ID NO: 60232 - DNA, 19 bp, Homo Sapiens
gaaaccgggcagaagcacc

SEQ ID NO: 60233 - DNA, 17 bp, Homo Sapiens
gaaaccgggcggaaaca

SEQ ID NO: 60234 - DNA, 36 bp, Homo Sapiens; identical to SEQ ID NO: 16007

SEQ ID NO: 60235 - DNA, 32 bp, Homo Sapiens; identical to SEQ ID NO: 17062

SEQ ID NO: 60236 - DNA, 30 bp, Homo Sapiens; identical to SEQ ID NO: 18559

SEQ ID NO: 60237 - DNA, 24 bp, Homo Sapiens
ggttcaaatcccggacgagccccc

SEQ ID NO: 60238 - DNA, 35 bp, Homo Sapiens; identical to SEQ ID NO: 24646

SEQ ID NO: 60239 - DNA, 40 bp, Homo Sapiens; identical to SEQ ID NO: 41654

SEQ ID NO: 60240 - DNA, 36 bp, Homo Sapiens; identical to SEQ ID NO: 26864

SEQ ID NO: 60241 - DNA, 35 bp, Homo Sapiens; identical to SEQ ID NO: 30250

SEQ ID NO: 60242 - DNA, 36 bp, Homo Sapiens; identical to SEQ ID NO: 8927

SEQ ID NO: 60243 - DNA, 31 bp, Homo Sapiens; identical to SEQ ID NO: 747

SEQ ID NO: 60244 - DNA, 26 bp, Homo Sapiens
gtagtggttatcacgttcgcctcaca

SEQ ID NO: 60245 - DNA, 29 bp, Homo Sapiens
gtcggtagagcatgggactcttaatccca

SEQ ID NO: 60246 - DNA, 48 bp, Homo Sapiens; identical to SEQ ID NO: 15503

SEQ ID NO: 60247 - DNA, 17 bp, Homo Sapiens
agttctggtctccggat

SEQ ID NO: 60248 - DNA, 18 bp, Homo Sapiens
aaccgggcagaaacacca

SEQ ID NO: 60249 - DNA, 35 bp, Homo Sapiens; identical to SEQ ID NO: 10673

SEQ ID NO: 60250 - DNA, 30 bp, Homo Sapiens; identical to SEQ ID NO: 2590

SEQ ID NO: 60251 - DNA, 37 bp, Homo Sapiens; identical to SEQ ID NO: 2889

SEQ ID NO: 60252 - DNA, 40 bp, Homo Sapiens; identical to SEQ ID NO: 10736

SEQ ID NO: 60253 - DNA, 36 bp, Homo Sapiens; identical to SEQ ID NO: 24964

SEQ ID NO: 60254 - DNA, 33 bp, Homo Sapiens; identical to SEQ ID NO: 16879

SEQ ID NO: 60255 - DNA, 18 bp, Homo Sapiens
aaccgagcggaaacacca

SEQ ID NO: 60256 - DNA, 48 bp, Homo Sapiens; identical to SEQ ID NO: 6485

SEQ ID NO: 60257 - DNA, 17 bp, Homo Sapiens
aaccgggcagaaacacc

SEQ ID NO: 60258 - DNA, 18 bp, Homo Sapiens
ggggttcgattccttcct

SEQ ID NO: 60259 - DNA, 42 bp, Homo Sapiens; identical to SEQ ID NO: 9544

SEQ ID NO: 60260 - DNA, 36 bp, Homo Sapiens; identical to SEQ ID NO: 7250

SEQ ID NO: 60261 - DNA, 29 bp, Homo Sapiens
gtcggtagagcatgagactcttaatctca

SEQ ID NO: 60262 - DNA, 48 bp, Homo Sapiens; identical to SEQ ID NO: 1967

SEQ ID NO: 60263 - DNA, 31 bp, Homo Sapiens; identical to SEQ ID NO: 17920

SEQ ID NO: 60264 - DNA, 31 bp, Homo Sapiens; identical to SEQ ID NO: 16238

SEQ ID NO: 60265 - DNA, 31 bp, Homo Sapiens; identical to SEQ ID NO: 10570

SEQ ID NO: 60266 - DNA, 37 bp, Homo Sapiens; identical to SEQ ID NO: 13206

SEQ ID NO: 60267 - DNA, 17 bp, Homo Sapiens
aaccgagcggaaacacc

SEQ ID NO: 60268 - DNA, 33 bp, Homo Sapiens; identical to SEQ ID NO: 15078

SEQ ID NO: 60269 - DNA, 18 bp, Homo Sapiens
tggttatcacgtctgctt

SEQ ID NO: 60270 - DNA, 34 bp, Homo Sapiens; identical to SEQ ID NO: 15079

SEQ ID NO: 60271 - DNA, 34 bp, Homo Sapiens; identical to SEQ ID NO: 29264

SEQ ID NO: 60272 - DNA, 31 bp, Homo Sapiens; identical to SEQ ID NO: 15076

SEQ ID NO: 60273 - DNA, 37 bp, Homo Sapiens; identical to SEQ ID NO: 2311

SEQ ID NO: 60274 - DNA, 34 bp, Homo Sapiens; identical to SEQ ID NO: 4435

SEQ ID NO: 60275 - DNA, 34 bp, Homo Sapiens; identical to SEQ ID NO: 10908

SEQ ID NO: 60276 - DNA, 32 bp, Homo Sapiens; identical to SEQ ID NO: 14910

SEQ ID NO: 60277 - DNA, 29 bp, Homo Sapiens
ttggtctaggggtatgattctcgctttgg

SEQ ID NO: 60278 - DNA, 28 bp, Homo Sapiens
ggtccagggttcaagtccctgttcgggc

SEQ ID NO: 60279 - DNA, 33 bp, Homo Sapiens; identical to SEQ ID NO: 23457

SEQ ID NO: 60280 - DNA, 34 bp, Homo Sapiens; identical to SEQ ID NO: 10672

SEQ ID NO: 60281 - DNA, 32 bp, Homo Sapiens; identical to SEQ ID NO: 3921

SEQ ID NO: 60282 - DNA, 34 bp, Homo Sapiens; identical to SEQ ID NO: 8039

SEQ ID NO: 60283 - DNA, 34 bp, Homo Sapiens; identical to SEQ ID NO: 15089

SEQ ID NO: 60284 - DNA, 32 bp, Homo Sapiens; identical to SEQ ID NO: 26542

SEQ ID NO: 60285 - DNA, 35 bp, Homo Sapiens; identical to SEQ ID NO: 10988

SEQ ID NO: 60286 - DNA, 26 bp, Homo Sapiens
gctcagtcggtagagcatgagactct

SEQ ID NO: 60287 - DNA, 40 bp, Homo Sapiens; identical to SEQ ID NO: 22230

SEQ ID NO: 60288 - DNA, 31 bp, Homo Sapiens; identical to SEQ ID NO: 4233

SEQ ID NO: 60289 - DNA, 17 bp, Homo Sapiens
gcagcgatggccgagtg

SEQ ID NO: 60290 - DNA, 25 bp, Homo Sapiens
tagtaccgttaacttccaattaact

SEQ ID NO: 60291 - DNA, 34 bp, Homo Sapiens; identical to SEQ ID NO: 29843

SEQ ID NO: 60292 - DNA, 33 bp, Homo Sapiens; identical to SEQ ID NO: 1052

SEQ ID NO: 60293 - DNA, 28 bp, Homo Sapiens
agaaagctcacaagaactgctaactcat

SEQ ID NO: 60294 - DNA, 30 bp, Homo Sapiens; identical to SEQ ID NO: 7630

SEQ ID NO: 60295 - DNA, 22 bp, Homo Sapiens
gacttaagatccaatggacata

SEQ ID NO: 60296 - DNA, 34 bp, Homo Sapiens; identical to SEQ ID NO: 16880

SEQ ID NO: 60297 - DNA, 38 bp, Homo Sapiens; identical to SEQ ID NO: 23348

SEQ ID NO: 60298 - DNA, 46 bp, Homo Sapiens; identical to SEQ ID NO: 7746

SEQ ID NO: 60299 - DNA, 34 bp, Homo Sapiens; identical to SEQ ID NO: 21187

SEQ ID NO: 60300 - DNA, 34 bp, Homo Sapiens; identical to SEQ ID NO: 4780

SEQ ID NO: 60301 - DNA, 44 bp, Homo Sapiens; identical to SEQ ID NO: 22552

SEQ ID NO: 60302 - DNA, 33 bp, Homo Sapiens; identical to SEQ ID NO: 2707

SEQ ID NO: 60303 - DNA, 40 bp, Homo Sapiens; identical to SEQ ID NO: 21196

SEQ ID NO: 60304 - DNA, 33 bp, Homo Sapiens; identical to SEQ ID NO: 26525

SEQ ID NO: 60305 - DNA, 36 bp, Homo Sapiens; identical to SEQ ID NO: 16666

SEQ ID NO: 60306 - DNA, 37 bp, Homo Sapiens; identical to SEQ ID NO: 6717

SEQ ID NO: 60307 - DNA, 38 bp, Homo Sapiens; identical to SEQ ID NO: 8791

SEQ ID NO: 60308 - DNA, 44 bp, Homo Sapiens; identical to SEQ ID NO: 21494

SEQ ID NO: 60309 - DNA, 20 bp, Homo Sapiens
gagcatgggactcttaatcc

SEQ ID NO: 60310 - DNA, 27 bp, Homo Sapiens
agtaagttgcaatacttaatttctgcc

SEQ ID NO: 60311 - DNA, 27 bp, Homo Sapiens
gaaagctcacaagaactgctaactcat

SEQ ID NO: 60312 - DNA, 46 bp, Homo Sapiens; identical to SEQ ID NO: 19946

SEQ ID NO: 60313 - DNA, 30 bp, Homo Sapiens; identical to SEQ ID NO: 4474

SEQ ID NO: 60314 - DNA, 33 bp, Homo Sapiens; identical to SEQ ID NO: 11073

SEQ ID NO: 60315 - DNA, 33 bp, Homo Sapiens; identical to SEQ ID NO: 21141

SEQ ID NO: 60316 - DNA, 22 bp, Homo Sapiens
gtggttatcacatctgctttac

SEQ ID NO: 60317 - DNA, 30 bp, Homo Sapiens; identical to SEQ ID NO: 10503

SEQ ID NO: 60318 - DNA, 48 bp, Homo Sapiens; identical to SEQ ID NO: 8259

SEQ ID NO: 60319 - DNA, 37 bp, Homo Sapiens; identical to SEQ ID NO: 22497

SEQ ID NO: 60320 - DNA, 18 bp, Homo Sapiens
aactgggcggaaacacca

SEQ ID NO: 60321 - DNA, 31 bp, Homo Sapiens; identical to SEQ ID NO: 2705

SEQ ID NO: 60322 - DNA, 32 bp, Homo Sapiens; identical to SEQ ID NO: 8806

SEQ ID NO: 60323 - DNA, 16 bp, Homo Sapiens
cgcccggctagctcag

SEQ ID NO: 60324 - DNA, 46 bp, Homo Sapiens; identical to SEQ ID NO: 58

SEQ ID NO: 60325 - DNA, 45 bp, Homo Sapiens; identical to SEQ ID NO: 20165

SEQ ID NO: 60326 - DNA, 43 bp, Homo Sapiens; identical to SEQ ID NO: 7621

SEQ ID NO: 60327 - DNA, 33 bp, Homo Sapiens; identical to SEQ ID NO: 10211

SEQ ID NO: 60328 - DNA, 32 bp, Homo Sapiens; identical to SEQ ID NO: 10829

SEQ ID NO: 60329 - DNA, 21 bp, Homo Sapiens
cttaagatccaatggacatat

SEQ ID NO: 60330 - DNA, 27 bp, Homo Sapiens
tagctcagtcggtagagcatgagactc

SEQ ID NO: 60331 - DNA, 31 bp, Homo Sapiens; identical to SEQ ID NO: 7037

SEQ ID NO: 60332 - DNA, 35 bp, Homo Sapiens; identical to SEQ ID NO: 7424

SEQ ID NO: 60333 - DNA, 31 bp, Homo Sapiens; identical to SEQ ID NO: 17725

SEQ ID NO: 60334 - DNA, 25 bp, Homo Sapiens
agcagcttcaaacctgccggggctt

SEQ ID NO: 60335 - DNA, 16 bp, Homo Sapiens
ttaggagatttcaact

SEQ ID NO: 60336 - DNA, 28 bp, Homo Sapiens
ttttgacaacattcaaaaaagagtacca

SEQ ID NO: 60337 - DNA, 31 bp, Homo Sapiens; identical to SEQ ID NO: 15332

SEQ ID NO: 60338 - DNA, 32 bp, Homo Sapiens; identical to SEQ ID NO: 21140

SEQ ID NO: 60339 - DNA, 48 bp, Homo Sapiens; identical to SEQ ID NO: 24785

SEQ ID NO: 60340 - DNA, 32 bp, Homo Sapiens; identical to SEQ ID NO: 10267

SEQ ID NO: 60341 - DNA, 31 bp, Homo Sapiens; identical to SEQ ID NO: 10815

SEQ ID NO: 60342 - DNA, 32 bp, Homo Sapiens; identical to SEQ ID NO: 13255

SEQ ID NO: 60343 - DNA, 30 bp, Homo Sapiens; identical to SEQ ID NO: 3839

SEQ ID NO: 60344 - DNA, 31 bp, Homo Sapiens; identical to SEQ ID NO: 13047

SEQ ID NO: 60345 - DNA, 26 bp, Homo Sapiens
agcagcttcaaacctgccggggcttc

SEQ ID NO: 60346 - DNA, 17 bp, Homo Sapiens
ttcccggccagggaacc

SEQ ID NO: 60347 - DNA, 37 bp, Homo Sapiens; identical to SEQ ID NO: 26409

SEQ ID NO: 60348 - DNA, 31 bp, Homo Sapiens; identical to SEQ ID NO: 10276

SEQ ID NO: 60349 - DNA, 48 bp, Homo Sapiens; identical to SEQ ID NO: 1961

SEQ ID NO: 60350 - DNA, 34 bp, Homo Sapiens; identical to SEQ ID NO: 8925

SEQ ID NO: 60351 - DNA, 45 bp, Homo Sapiens; identical to SEQ ID NO: 14160

SEQ ID NO: 60352 - DNA, 33 bp, Homo Sapiens; identical to SEQ ID NO: 15287

SEQ ID NO: 60353 - DNA, 30 bp, Homo Sapiens; identical to SEQ ID NO: 15773

SEQ ID NO: 60354 - DNA, 35 bp, Homo Sapiens; identical to SEQ ID NO: 8926

SEQ ID NO: 60355 - DNA, 17 bp, Homo Sapiens
ctggttcgattccggct

SEQ ID NO: 60356 - DNA, 41 bp, Homo Sapiens; identical to SEQ ID NO: 31016

SEQ ID NO: 60357 - DNA, 40 bp, Homo Sapiens; identical to SEQ ID NO: 25685

SEQ ID NO: 60358 - DNA, 34 bp, Homo Sapiens; identical to SEQ ID NO: 771

SEQ ID NO: 60359 - DNA, 21 bp, Homo Sapiens
agagtaaataataggagctta

SEQ ID NO: 60360 - DNA, 32 bp, Homo Sapiens; identical to SEQ ID NO: 10481

SEQ ID NO: 60361 - DNA, 31 bp, Homo Sapiens; identical to SEQ ID NO: 15486

SEQ ID NO: 60362 - DNA, 39 bp, Homo Sapiens; identical to SEQ ID NO: 7909

SEQ ID NO: 60363 - DNA, 35 bp, Homo Sapiens; identical to SEQ ID NO: 13650

SEQ ID NO: 60364 - DNA, 39 bp, Homo Sapiens; identical to SEQ ID NO: 17118

SEQ ID NO: 60365 - DNA, 25 bp, Homo Sapiens
ttagaatcttagctttgggtgctaa

SEQ ID NO: 60366 - DNA, 46 bp, Homo Sapiens; identical to SEQ ID NO: 29176

SEQ ID NO: 60367 - DNA, 34 bp, Homo Sapiens; identical to SEQ ID NO: 6230

SEQ ID NO: 60368 - DNA, 31 bp, Homo Sapiens; identical to SEQ ID NO: 10266

SEQ ID NO: 60369 - DNA, 42 bp, Homo Sapiens; identical to SEQ ID NO: 14975

SEQ ID NO: 60370 - DNA, 32 bp, Homo Sapiens; identical to SEQ ID NO: 1540

SEQ ID NO: 60371 - DNA, 48 bp, Homo Sapiens; identical to SEQ ID NO: 6258

SEQ ID NO: 60372 - DNA, 18 bp, Homo Sapiens
gtcccggcagagatgcca

SEQ ID NO: 60373 - DNA, 35 bp, Homo Sapiens; identical to SEQ ID NO: 29550

SEQ ID NO: 60374 - DNA, 48 bp, Homo Sapiens; identical to SEQ ID NO: 978

SEQ ID NO: 60375 - DNA, 44 bp, Homo Sapiens; identical to SEQ ID NO: 7693

SEQ ID NO: 60376 - DNA, 41 bp, Homo Sapiens; identical to SEQ ID NO: 8794

SEQ ID NO: 60377 - DNA, 48 bp, Homo Sapiens; identical to SEQ ID NO: 8801

SEQ ID NO: 60378 - DNA, 32 bp, Homo Sapiens; identical to SEQ ID NO: 9679

SEQ ID NO: 60379 - DNA, 44 bp, Homo Sapiens; identical to SEQ ID NO: 15269

SEQ ID NO: 60380 - DNA, 34 bp, Homo Sapiens; identical to SEQ ID NO: 273

SEQ ID NO: 60381 - DNA, 33 bp, Homo Sapiens; identical to SEQ ID NO: 10496

SEQ ID NO: 60382 - DNA, 24 bp, Homo Sapiens
cccattcttgcgacccgggttcga

SEQ ID NO: 60383 - DNA, 32 bp, Homo Sapiens; identical to SEQ ID NO: 13378

SEQ ID NO: 60384 - DNA, 40 bp, Homo Sapiens; identical to SEQ ID NO: 19702

SEQ ID NO: 60385 - DNA, 34 bp, Homo Sapiens; identical to SEQ ID NO: 27658

SEQ ID NO: 60386 - DNA, 48 bp, Homo Sapiens; identical to SEQ ID NO: 3720

SEQ ID NO: 60387 - DNA, 44 bp, Homo Sapiens; identical to SEQ ID NO: 8797

SEQ ID NO: 60388 - DNA, 34 bp, Homo Sapiens; identical to SEQ ID NO: 13417

SEQ ID NO: 60389 - DNA, 48 bp, Homo Sapiens; identical to SEQ ID NO: 23915

SEQ ID NO: 60390 - DNA, 33 bp, Homo Sapiens; identical to SEQ ID NO: 28596

SEQ ID NO: 60391 - DNA, 33 bp, Homo Sapiens; identical to SEQ ID NO: 3077

SEQ ID NO: 60392 - DNA, 25 bp, Homo Sapiens
gagatgaaaacctttttccaaggac

SEQ ID NO: 60393 - DNA, 16 bp, Homo Sapiens
gtcgcagtctcccctg

SEQ ID NO: 60394 - DNA, 30 bp, Homo Sapiens; identical to SEQ ID NO: 5865

SEQ ID NO: 60395 - DNA, 32 bp, Homo Sapiens; identical to SEQ ID NO: 6370

SEQ ID NO: 60396 - DNA, 33 bp, Homo Sapiens; identical to SEQ ID NO: 14500

SEQ ID NO: 60397 - DNA, 30 bp, Homo Sapiens; identical to SEQ ID NO: 22648

SEQ ID NO: 60398 - DNA, 38 bp, Homo Sapiens; identical to SEQ ID NO: 23697

SEQ ID NO: 60399 - DNA, 26 bp, Homo Sapiens
tttgatagagtaaataataggagctt

SEQ ID NO: 60400 - DNA, 45 bp, Homo Sapiens; identical to SEQ ID NO: 57

SEQ ID NO: 60401 - DNA, 36 bp, Homo Sapiens; identical to SEQ ID NO: 6656

SEQ ID NO: 60402 - DNA, 37 bp, Homo Sapiens; identical to SEQ ID NO: 17342

SEQ ID NO: 60403 - DNA, 32 bp, Homo Sapiens; identical to SEQ ID NO: 836

SEQ ID NO: 60404 - DNA, 38 bp, Homo Sapiens; identical to SEQ ID NO: 3115

SEQ ID NO: 60405 - DNA, 34 bp, Homo Sapiens; identical to SEQ ID NO: 8787

SEQ ID NO: 60406 - DNA, 34 bp, Homo Sapiens; identical to SEQ ID NO: 9708

SEQ ID NO: 60407 - DNA, 34 bp, Homo Sapiens; identical to SEQ ID NO: 23693

SEQ ID NO: 60408 - DNA, 43 bp, Homo Sapiens; identical to SEQ ID NO: 28347

SEQ ID NO: 60409 - DNA, 41 bp, Homo Sapiens; identical to SEQ ID NO: 4159

SEQ ID NO: 60410 - DNA, 45 bp, Homo Sapiens; identical to SEQ ID NO: 8798

SEQ ID NO: 60411 - DNA, 45 bp, Homo Sapiens; identical to SEQ ID NO: 12307

SEQ ID NO: 60412 - DNA, 32 bp, Homo Sapiens; identical to SEQ ID NO: 15286

SEQ ID NO: 60413 - DNA, 32 bp, Homo Sapiens; identical to SEQ ID NO: 17569

SEQ ID NO: 60414 - DNA, 21 bp, Homo Sapiens
tcaaagttaaattataggcta

SEQ ID NO: 60415 - DNA, 44 bp, Homo Sapiens; identical to SEQ ID NO: 27177

SEQ ID NO: 60416 - DNA, 34 bp, Homo Sapiens; identical to SEQ ID NO: 27197

SEQ ID NO: 60417 - DNA, 37 bp, Homo Sapiens; identical to SEQ ID NO: 2795

SEQ ID NO: 60418 - DNA, 26 bp, Homo Sapiens
agaaagctcacaagaactgctaactc

SEQ ID NO: 60419 - DNA, 39 bp, Homo Sapiens; identical to SEQ ID NO: 5421

SEQ ID NO: 60420 - DNA, 32 bp, Homo Sapiens; identical to SEQ ID NO: 10582

SEQ ID NO: 60421 - DNA, 44 bp, Homo Sapiens; identical to SEQ ID NO: 14846

SEQ ID NO: 60422 - DNA, 31 bp, Homo Sapiens; identical to SEQ ID NO: 22605

SEQ ID NO: 60423 - DNA, 30 bp, Homo Sapiens; identical to SEQ ID NO: 25109

SEQ ID NO: 60424 - DNA, 46 bp, Homo Sapiens; identical to SEQ ID NO: 4928

SEQ ID NO: 60425 - DNA, 33 bp, Homo Sapiens; identical to SEQ ID NO: 13751

SEQ ID NO: 60426 - DNA, 34 bp, Homo Sapiens; identical to SEQ ID NO: 23712

SEQ ID NO: 60427 - DNA, 35 bp, Homo Sapiens; identical to SEQ ID NO: 274

SEQ ID NO: 60428 - DNA, 25 bp, Homo Sapiens
tagaattctcgcctgccacgcggga

SEQ ID NO: 60429 - DNA, 32 bp, Homo Sapiens; identical to SEQ ID NO: 3076

SEQ ID NO: 60430 - DNA, 42 bp, Homo Sapiens; identical to SEQ ID NO: 11550

SEQ ID NO: 60431 - DNA, 33 bp, Homo Sapiens; identical to SEQ ID NO: 24144

SEQ ID NO: 60432 - DNA, 28 bp, Homo Sapiens
atgggttcgattctcatagtcctagcca

SEQ ID NO: 60433 - DNA, 37 bp, Homo Sapiens; identical to SEQ ID NO: 7426

SEQ ID NO: 60434 - DNA, 43 bp, Homo Sapiens; identical to SEQ ID NO: 15425

SEQ ID NO: 60435 - DNA, 28 bp, Homo Sapiens
gttttgacaacattcaaaaaagagtacc

SEQ ID NO: 60436 - DNA, 48 bp, Homo Sapiens; identical to SEQ ID NO: 23932

SEQ ID NO: 60437 - DNA, 33 bp, Homo Sapiens; identical to SEQ ID NO: 29168

SEQ ID NO: 60438 - DNA, 29 bp, Homo Sapiens
aacagaggcttacgaccccttatttaccc

SEQ ID NO: 60439 - DNA, 31 bp, Homo Sapiens; identical to SEQ ID NO: 1853

SEQ ID NO: 60440 - DNA, 37 bp, Homo Sapiens; identical to SEQ ID NO: 2042

SEQ ID NO: 60441 - DNA, 29 bp, Homo Sapiens
acaggagatcctgggttcgaatcccagcg

SEQ ID NO: 60442 - DNA, 29 bp, Homo Sapiens
agcgatccgagttcaaatctcggtggaac

SEQ ID NO: 60443 - DNA, 24 bp, Homo Sapiens
agcgtgctgggcccataacccaga

SEQ ID NO: 60444 - DNA, 36 bp, Homo Sapiens; identical to SEQ ID NO: 6797

SEQ ID NO: 60445 - DNA, 18 bp, Homo Sapiens
attaactagttttgacaa

SEQ ID NO: 60446 - DNA, 32 bp, Homo Sapiens; identical to SEQ ID NO: 8617

SEQ ID NO: 60447 - DNA, 25 bp, Homo Sapiens
cagattgtgaatctgacaacagagg

SEQ ID NO: 60448 - DNA, 48 bp, Homo Sapiens; identical to SEQ ID NO: 9513

SEQ ID NO: 60449 - DNA, 46 bp, Homo Sapiens; identical to SEQ ID NO: 17021

SEQ ID NO: 60450 - DNA, 46 bp, Homo Sapiens; identical to SEQ ID NO: 23097

SEQ ID NO: 60451 - DNA, 37 bp, Homo Sapiens; identical to SEQ ID NO: 24900

SEQ ID NO: 60452 - DNA, 35 bp, Homo Sapiens; identical to SEQ ID NO: 28571

SEQ ID NO: 60453 - DNA, 34 bp, Homo Sapiens; identical to SEQ ID NO: 29549

SEQ ID NO: 60454 - DNA, 48 bp, Homo Sapiens; identical to SEQ ID NO: 30101

SEQ ID NO: 60455 - DNA, 34 bp, Homo Sapiens; identical to SEQ ID NO: 30584

SEQ ID NO: 60456 - DNA, 31 bp, Homo Sapiens; identical to SEQ ID NO: 131

SEQ ID NO: 60457 - DNA, 48 bp, Homo Sapiens; identical to SEQ ID NO: 2836

SEQ ID NO: 60458 - DNA, 31 bp, Homo Sapiens; identical to SEQ ID NO: 2978

SEQ ID NO: 60459 - DNA, 48 bp, Homo Sapiens; identical to SEQ ID NO: 5318

SEQ ID NO: 60460 - DNA, 36 bp, Homo Sapiens; identical to SEQ ID NO: 9299

SEQ ID NO: 60461 - DNA, 48 bp, Homo Sapiens; identical to SEQ ID NO: 10367

SEQ ID NO: 60462 - DNA, 44 bp, Homo Sapiens; identical to SEQ ID NO: 14399

SEQ ID NO: 60463 - DNA, 16 bp, Homo Sapiens
cttaatctcagggtcg

SEQ ID NO: 60464 - DNA, 20 bp, Homo Sapiens
cttaggagatttcaacttaa

SEQ ID NO: 60465 - DNA, 33 bp, Homo Sapiens; identical to SEQ ID NO: 14966

SEQ ID NO: 60466 - DNA, 34 bp, Homo Sapiens; identical to SEQ ID NO: 19196

SEQ ID NO: 60467 - DNA, 23 bp, Homo Sapiens
gtagagcatgagactcttaatct

SEQ ID NO: 60468 - DNA, 32 bp, Homo Sapiens; identical to SEQ ID NO: 21185

SEQ ID NO: 60469 - DNA, 34 bp, Homo Sapiens; identical to SEQ ID NO: 23053

SEQ ID NO: 60470 - DNA, 34 bp, Homo Sapiens; identical to SEQ ID NO: 25300

SEQ ID NO: 60471 - DNA, 34 bp, Homo Sapiens; identical to SEQ ID NO: 25424

SEQ ID NO: 60472 - DNA, 35 bp, Homo Sapiens; identical to SEQ ID NO: 28919

SEQ ID NO: 60473 - DNA, 48 bp, Homo Sapiens; identical to SEQ ID NO: 29231

SEQ ID NO: 60474 - DNA, 31 bp, Homo Sapiens; identical to SEQ ID NO: 29261

SEQ ID NO: 60475 - DNA, 32 bp, Homo Sapiens; identical to SEQ ID NO: 415

SEQ ID NO: 60476 - DNA, 31 bp, Homo Sapiens; identical to SEQ ID NO: 1153

SEQ ID NO: 60477 - DNA, 27 bp, Homo Sapiens
aagagaaccaacacctctttacagtga

SEQ ID NO: 60478 - DNA, 33 bp, Homo Sapiens; identical to SEQ ID NO: 2572

SEQ ID NO: 60479 - DNA, 33 bp, Homo Sapiens; identical to SEQ ID NO: 3238

SEQ ID NO: 60480 - DNA, 26 bp, Homo Sapiens
agaggcttacgaccccttatttaccc

SEQ ID NO: 60481 - DNA, 48 bp, Homo Sapiens; identical to SEQ ID NO: 7156

SEQ ID NO: 60482 - DNA, 29 bp, Homo Sapiens
caacagaggcttacgaccccttatttacc

SEQ ID NO: 60483 - DNA, 34 bp, Homo Sapiens; identical to SEQ ID NO: 17216

SEQ ID NO: 60484 - DNA, 31 bp, Homo Sapiens; identical to SEQ ID NO: 18539

SEQ ID NO: 60485 - DNA, 33 bp, Homo Sapiens; identical to SEQ ID NO: 19195

SEQ ID NO: 60486 - DNA, 34 bp, Homo Sapiens; identical to SEQ ID NO: 20409

SEQ ID NO: 60487 - DNA, 32 bp, Homo Sapiens; identical to SEQ ID NO: 23654

SEQ ID NO: 60488 - DNA, 48 bp, Homo Sapiens; identical to SEQ ID NO: 26979

SEQ ID NO: 60489 - DNA, 35 bp, Homo Sapiens; identical to SEQ ID NO: 30464

SEQ ID NO: 60490 - DNA, 31 bp, Homo Sapiens; identical to SEQ ID NO: 3827

SEQ ID NO: 60491 - DNA, 48 bp, Homo Sapiens; identical to SEQ ID NO: 4619

SEQ ID NO: 60492 - DNA, 23 bp, Homo Sapiens
agtctcataatctgaaggtcgtg

SEQ ID NO: 60493 - DNA, 37 bp, Homo Sapiens; identical to SEQ ID NO: 6215

SEQ ID NO: 60494 - DNA, 48 bp, Homo Sapiens; identical to SEQ ID NO: 7997

SEQ ID NO: 60495 - DNA, 33 bp, Homo Sapiens; identical to SEQ ID NO: 8308

SEQ ID NO: 60496 - DNA, 16 bp, Homo Sapiens
cataatctgaaggtcg

SEQ ID NO: 60497 - DNA, 26 bp, Homo Sapiens
cggtagagcatgggactcttaatccc

SEQ ID NO: 60498 - DNA, 48 bp, Homo Sapiens; identical to SEQ ID NO: 15058

SEQ ID NO: 60499 - DNA, 25 bp, Homo Sapiens
gaattgcaaattcgaagaagcagct

SEQ ID NO: 60500 - DNA, 28 bp, Homo Sapiens
gatgggttcgattctcatagtcctagcc

SEQ ID NO: 60501 - DNA, 34 bp, Homo Sapiens; identical to SEQ ID NO: 20393

SEQ ID NO: 60502 - DNA, 28 bp, Homo Sapiens
gtccgcgtgggttcgaaccccactcctg

SEQ ID NO: 60503 - DNA, 33 bp, Homo Sapiens; identical to SEQ ID NO: 23692

SEQ ID NO: 60504 - DNA, 26 bp, Homo Sapiens
tgcaggttcgagtcctgccgcggtcg

SEQ ID NO: 60505 - DNA, 26 bp, Homo Sapiens
tttgacaacattcaaaaaagagtacc

SEQ ID NO: 60506 - DNA, 18 bp, Homo Sapiens
aaaccggagatgaaaacc

SEQ ID NO: 60507 - DNA, 16 bp, Homo Sapiens
aaagcacccaacttac

SEQ ID NO: 60508 - DNA, 26 bp, Homo Sapiens
agaaatatgtctgataaaagagttac

SEQ ID NO: 60509 - DNA, 31 bp, Homo Sapiens; identical to SEQ ID NO: 5004

SEQ ID NO: 60510 - DNA, 17 bp, Homo Sapiens
ggggttcgattccttcc

SEQ ID NO: 60511 - DNA, 38 bp, Homo Sapiens; identical to SEQ ID NO: 19223

SEQ ID NO: 60512 - DNA, 29 bp, Homo Sapiens
gtggtagaattctcgcctgccacgcggga

SEQ ID NO: 60513 - DNA, 41 bp, Homo Sapiens; identical to SEQ ID NO: 21569

SEQ ID NO: 60514 - DNA, 16 bp, Homo Sapiens
taactagttttgacaa

SEQ ID NO: 60515 - DNA, 30 bp, Homo Sapiens; identical to SEQ ID NO: 23689

SEQ ID NO: 60516 - DNA, 32 bp, Homo Sapiens; identical to SEQ ID NO: 23710

SEQ ID NO: 60517 - DNA, 27 bp, Homo Sapiens
tcagctaaataagctatcgggcccata

SEQ ID NO: 60518 - DNA, 31 bp, Homo Sapiens; identical to SEQ ID NO: 25127

SEQ ID NO: 60519 - DNA, 42 bp, Homo Sapiens; identical to SEQ ID NO: 25542

SEQ ID NO: 60520 - DNA, 17 bp, Homo Sapiens
tcttaatctcagggtcg

SEQ ID NO: 60521 - DNA, 17 bp, Homo Sapiens
ttaactagttttgacaa

SEQ ID NO: 60522 - DNA, 36 bp, Homo Sapiens; identical to SEQ ID NO: 30077

SEQ ID NO: 60523 - DNA, 26 bp, Homo Sapiens
agggattgtgggttcgagtcccatct

SEQ ID NO: 60524 - DNA, 37 bp, Homo Sapiens; identical to SEQ ID NO: 11954

SEQ ID NO: 60525 - DNA, 43 bp, Homo Sapiens; identical to SEQ ID NO: 15425

SEQ ID NO: 60526 - DNA, 24 bp, Homo Sapiens
gcgttcgattcccggtcagggaac

SEQ ID NO: 60527 - DNA, 41 bp, Homo Sapiens; identical to SEQ ID NO: 30929

SEQ ID NO: 60528 - DNA, 29 bp, Homo Sapiens
ccagatcagaaggctgcgtgttcgaatca

SEQ ID NO: 60529 - DNA, 16 bp, Homo Sapiens
acttataatgccgagg

SEQ ID NO: 60530 - DNA, 16 bp, Homo Sapiens
ctcagtcggtagagct

SEQ ID NO: 60531 - DNA, 21 bp, Homo Sapiens
cggtttgggtccgagaggtcc

SEQ ID NO: 60532 - DNA, 45 bp, Homo Sapiens; identical to SEQ ID NO: 28180

SEQ ID NO: 60533 - DNA, 28 bp, Homo Sapiens
ccagggttcaagtccctgtccaggcgcc

SEQ ID NO: 60534 - DNA, 43 bp, Homo Sapiens; identical to SEQ ID NO: 9747

SEQ ID NO: 60535 - DNA, 18 bp, Homo Sapiens
ggatggccgagtggtcta

SEQ ID NO: 60536 - DNA, 16 bp, Homo Sapiens
cagcgatccgagttcg

SEQ ID NO: 60537 - DNA, 25 bp, Homo Sapiens
tggcagagcccggtaatcgcataaa

SEQ ID NO: 60538 - DNA, 29 bp, Homo Sapiens
caaaacgaatgatttcgactcattaaatt

SEQ ID NO: 60539 - DNA, 16 bp, Homo Sapiens
cagagcatttgactgc

SEQ ID NO: 60540 - DNA, 18 bp, Homo Sapiens
caaattcgaagaagcagc

SEQ ID NO: 60541 - DNA, 19 bp, Homo Sapiens
acagaccaagagccttcaa

SEQ ID NO: 60542 - DNA, 23 bp, Homo Sapiens
tagtaccgttaacttccaattaa

SEQ ID NO: 60543 - DNA, 36 bp, Homo Sapiens; identical to SEQ ID NO: 13832

SEQ ID NO: 60544 - DNA, 27 bp, Homo Sapiens
gtgtagtggttatcacgtctgctttac

SEQ ID NO: 60545 - DNA, 25 bp, Homo Sapiens
ttagaatcttagctttgggtgctaa

SEQ ID NO: 60546 - DNA, 33 bp, Homo Sapiens; identical to SEQ ID NO: 2572

SEQ ID NO: 60547 - DNA, 20 bp, Homo Sapiens
accagctttggggggttcga

SEQ ID NO: 60548 - DNA, 36 bp, Homo Sapiens; identical to SEQ ID NO: 28964

SEQ ID NO: 60549 - DNA, 32 bp, Homo Sapiens; identical to SEQ ID NO: 26546

SEQ ID NO: 60550 - DNA, 17 bp, Homo Sapiens
agttctggtctccggat

SEQ ID NO: 60551 - DNA, 32 bp, Homo Sapiens; identical to SEQ ID NO: 1354

SEQ ID NO: 60552 - DNA, 34 bp, Homo Sapiens; identical to SEQ ID NO: 5225

SEQ ID NO: 60553 - DNA, 41 bp, Homo Sapiens; identical to SEQ ID NO: 4046

SEQ ID NO: 60554 - DNA, 16 bp, Homo Sapiens
tacaacgatggttttt

SEQ ID NO: 60555 - DNA, 32 bp, Homo Sapiens; identical to SEQ ID NO: 10280

SEQ ID NO: 60556 - DNA, 21 bp, Homo Sapiens
tttcgactcattaaattatga

SEQ ID NO: 60557 - DNA, 31 bp, Homo Sapiens; identical to SEQ ID NO: 9919

SEQ ID NO: 60558 - DNA, 31 bp, Homo Sapiens; identical to SEQ ID NO: 24837

SEQ ID NO: 60559 - DNA, 40 bp, Homo Sapiens; identical to SEQ ID NO: 1023

SEQ ID NO: 60560 - DNA, 33 bp, Homo Sapiens; identical to SEQ ID NO: 15078

SEQ ID NO: 60561 - DNA, 19 bp, Homo Sapiens
tcgggcccataccccgaaa

SEQ ID NO: 60562 - DNA, 34 bp, Homo Sapiens; identical to SEQ ID NO: 18184

SEQ ID NO: 60563 - DNA, 37 bp, Homo Sapiens; identical to SEQ ID NO: 29116

SEQ ID NO: 60564 - DNA, 35 bp, Homo Sapiens; identical to SEQ ID NO: 25357

SEQ ID NO: 60565 - DNA, 44 bp, Homo Sapiens; identical to SEQ ID NO: 29690

SEQ ID NO: 60566 - DNA, 16 bp, Homo Sapiens
aggtggcacggagaat

SEQ ID NO: 60567 - DNA, 30 bp, Homo Sapiens; identical to SEQ ID NO: 8843

SEQ ID NO: 60568 - DNA, 20 bp, Homo Sapiens
tacagaccaagagccttcaa

SEQ ID NO: 60569 - DNA, 40 bp, Homo Sapiens; identical to SEQ ID NO: 15938

SEQ ID NO: 60570 - DNA, 31 bp, Homo Sapiens; identical to SEQ ID NO: 15076

SEQ ID NO: 60571 - DNA, 29 bp, Homo Sapiens
ttggtctaggggtatgattctcgcttcgg

SEQ ID NO: 60572 - DNA, 19 bp, Homo Sapiens
aaactttacagtcagaggt

SEQ ID NO: 60573 - DNA, 25 bp, Homo Sapiens
acttccaattaactagttttgacaa

SEQ ID NO: 60574 - DNA, 16 bp, Homo Sapiens
gtcgcagtctcccctg

SEQ ID NO: 60575 - DNA, 22 bp, Homo Sapiens
gtgtgataggtggcacggagaa

SEQ ID NO: 60576 - DNA, 34 bp, Homo Sapiens; identical to SEQ ID NO: 18359

SEQ ID NO: 60577 - DNA, 31 bp, Homo Sapiens; identical to SEQ ID NO: 8811

SEQ ID NO: 60578 - DNA, 43 bp, Homo Sapiens; identical to SEQ ID NO: 2326

SEQ ID NO: 60579 - DNA, 39 bp, Homo Sapiens; identical to SEQ ID NO: 29118

SEQ ID NO: 60580 - DNA, 20 bp, Homo Sapiens
tgatagagtaaataatagga

SEQ ID NO: 60581 - DNA, 18 bp, Homo Sapiens
aggtgattttcatattga

SEQ ID NO: 60582 - DNA, 32 bp, Homo Sapiens; identical to SEQ ID NO: 25422

SEQ ID NO: 60583 - DNA, 31 bp, Homo Sapiens; identical to SEQ ID NO: 10266

SEQ ID NO: 60584 - DNA, 26 bp, Homo Sapiens
gctcagtcggtagagcatgagactct

SEQ ID NO: 60585 - DNA, 16 bp, Homo Sapiens
ttgattagggtgctta

SEQ ID NO: 60586 - DNA, 28 bp, Homo Sapiens
agtgtagtggttatcacgttcgcctcac

SEQ ID NO: 60587 - DNA, 31 bp, Homo Sapiens; identical to SEQ ID NO: 10276

SEQ ID NO: 60588 - DNA, 26 bp, Homo Sapiens
gtagtggttatcacgttcgcctcaca

SEQ ID NO: 60589 - DNA, 30 bp, Homo Sapiens; identical to SEQ ID NO: 8155

SEQ ID NO: 60590 - DNA, 27 bp, Homo Sapiens
gtgtagtggttatcacgttcgcctcac

SEQ ID NO: 60591 - DNA, 35 bp, Homo Sapiens; identical to SEQ ID NO: 23869

SEQ ID NO: 60592 - DNA, 30 bp, Homo Sapiens; identical to SEQ ID NO: 5838

SEQ ID NO: 60593 - DNA, 21 bp, Homo Sapiens
acaaaacgaatgatttcgact

SEQ ID NO: 60594 - DNA, 25 bp, Homo Sapiens
gtagtggttatcacgttcgcctcac

SEQ ID NO: 60595 - DNA, 27 bp, Homo Sapiens
gaatctgacaacagaggcttacgaccc

SEQ ID NO: 60596 - DNA, 33 bp, Homo Sapiens; identical to SEQ ID NO: 30108

SEQ ID NO: 60597 - DNA, 22 bp, Homo Sapiens
aggggtatgattctcgctttgg

SEQ ID NO: 60598 - DNA, 38 bp, Homo Sapiens; identical to SEQ ID NO: 26871

SEQ ID NO: 60599 - DNA, 30 bp, Homo Sapiens; identical to SEQ ID NO: 29619

SEQ ID NO: 60600 - DNA, 18 bp, Homo Sapiens
atcgggcccataccccga

SEQ ID NO: 60601 - DNA, 24 bp, Homo Sapiens
tagaatcttagctttgggtgctaa

SEQ ID NO: 60602 - DNA, 18 bp, Homo Sapiens
ttaagagaaccaacacct

SEQ ID NO: 60603 - DNA, 29 bp, Homo Sapiens
ccgtagtgtagcggttatcacattcgcct

SEQ ID NO: 60604 - DNA, 17 bp, Homo Sapiens
ttaattaaagtggctga

SEQ ID NO: 60605 - DNA, 34 bp, Homo Sapiens; identical to SEQ ID NO: 18330

SEQ ID NO: 60606 - DNA, 29 bp, Homo Sapiens
ttggtctaggggtatgattctcgctttgg

SEQ ID NO: 60607 - DNA, 40 bp, Homo Sapiens; identical to SEQ ID NO: 23636

SEQ ID NO: 60608 - DNA, 34 bp, Homo Sapiens; identical to SEQ ID NO: 18374

SEQ ID NO: 60609 - DNA, 29 bp, Homo Sapiens
ttggtctaggggtatgattctcggtttgg

SEQ ID NO: 60610 - DNA, 34 bp, Homo Sapiens; identical to SEQ ID NO: 30109

SEQ ID NO: 60611 - DNA, 33 bp, Homo Sapiens; identical to SEQ ID NO: 8807

SEQ ID NO: 60612 - DNA, 31 bp, Homo Sapiens; identical to SEQ ID NO: 2705

SEQ ID NO: 60613 - DNA, 37 bp, Homo Sapiens; identical to SEQ ID NO: 16689

SEQ ID NO: 60614 - DNA, 28 bp, Homo Sapiens
gatgggttcgattctcatagtcctagcc

SEQ ID NO: 60615 - DNA, 33 bp, Homo Sapiens; identical to SEQ ID NO: 25052

SEQ ID NO: 60616 - DNA, 16 bp, Homo Sapiens
ctcccggtatgggaac

SEQ ID NO: 60617 - DNA, 41 bp, Homo Sapiens; identical to SEQ ID NO: 29311

SEQ ID NO: 60618 - DNA, 31 bp, Homo Sapiens; identical to SEQ ID NO: 9705

SEQ ID NO: 60619 - DNA, 32 bp, Homo Sapiens; identical to SEQ ID NO: 9679

SEQ ID NO: 60620 - DNA, 18 bp, Homo Sapiens
aagtcccattggtctagc

SEQ ID NO: 60621 - DNA, 35 bp, Homo Sapiens; identical to SEQ ID NO: 30585

SEQ ID NO: 60622 - DNA, 30 bp, Homo Sapiens; identical to SEQ ID NO: 12289

SEQ ID NO: 60623 - DNA, 33 bp, Homo Sapiens; identical to SEQ ID NO: 22344

SEQ ID NO: 60624 - DNA, 31 bp, Homo Sapiens; identical to SEQ ID NO: 19350

SEQ ID NO: 60625 - DNA, 28 bp, Homo Sapiens
cgccaaggtcgcgggttcgatccccgta

SEQ ID NO: 60626 - DNA, 45 bp, Homo Sapiens; identical to SEQ ID NO: 25383

SEQ ID NO: 60627 - DNA, 36 bp, Homo Sapiens; identical to SEQ ID NO: 6797

SEQ ID NO: 60628 - DNA, 32 bp, Homo Sapiens; identical to SEQ ID NO: 14910

SEQ ID NO: 60629 - DNA, 28 bp, Homo Sapiens
atcagattgtgaatctgacaacagaggc

SEQ ID NO: 60630 - DNA, 29 bp, Homo Sapiens
tttgtgggtttaagtcccattggtctagc

SEQ ID NO: 60631 - DNA, 28 bp, Homo Sapiens
ttttgacaacattcaaaaaagagtacca

SEQ ID NO: 60632 - DNA, 39 bp, Homo Sapiens; identical to SEQ ID NO: 10651

SEQ ID NO: 60633 - DNA, 27 bp, Homo Sapiens
atgggttcgattctcatagtcctagcc

SEQ ID NO: 60634 - DNA, 31 bp, Homo Sapiens; identical to SEQ ID NO: 23302

SEQ ID NO: 60635 - DNA, 47 bp, Homo Sapiens; identical to SEQ ID NO: 28927

SEQ ID NO: 60636 - DNA, 34 bp, Homo Sapiens; identical to SEQ ID NO: 30584

SEQ ID NO: 60637 - DNA, 31 bp, Homo Sapiens; identical to SEQ ID NO: 9021

SEQ ID NO: 60638 - DNA, 47 bp, Homo Sapiens; identical to SEQ ID NO: 7508

SEQ ID NO: 60639 - DNA, 17 bp, Homo Sapiens
ggggttcgattccttcc

SEQ ID NO: 60640 - DNA, 23 bp, Homo Sapiens
aagttaaattataggctaaatcc

SEQ ID NO: 60641 - DNA, 45 bp, Homo Sapiens; identical to SEQ ID NO: 23096

SEQ ID NO: 60642 - DNA, 26 bp, Homo Sapiens
tttgacaacattcaaaaaagagtacc

SEQ ID NO: 60643 - DNA, 40 bp, Homo Sapiens; identical to SEQ ID NO: 26818

SEQ ID NO: 60644 - DNA, 38 bp, Homo Sapiens; identical to SEQ ID NO: 14153

SEQ ID NO: 60645 - DNA, 46 bp, Homo Sapiens; identical to SEQ ID NO: 24991

SEQ ID NO: 60646 - DNA, 35 bp, Homo Sapiens; identical to SEQ ID NO: 28905

SEQ ID NO: 60647 - DNA, 33 bp, Homo Sapiens; identical to SEQ ID NO: 13202

SEQ ID NO: 60648 - DNA, 36 bp, Homo Sapiens; identical to SEQ ID NO: 10426

SEQ ID NO: 60649 - DNA, 33 bp, Homo Sapiens; identical to SEQ ID NO: 22967

SEQ ID NO: 60650 - DNA, 31 bp, Homo Sapiens; identical to SEQ ID NO: 835

SEQ ID NO: 60651 - DNA, 38 bp, Homo Sapiens; identical to SEQ ID NO: 9712

SEQ ID NO: 60652 - DNA, 30 bp, Homo Sapiens; identical to SEQ ID NO: 20938

SEQ ID NO: 60653 - DNA, 27 bp, Homo Sapiens
aagagaaccaacacctctttacagtga

SEQ ID NO: 60654 - DNA, 25 bp, Homo Sapiens
ctatcgggcccataccccgaaaatg

SEQ ID NO: 60655 - DNA, 41 bp, Homo Sapiens; identical to SEQ ID NO: 31016

SEQ ID NO: 60656 - DNA, 34 bp, Homo Sapiens; identical to SEQ ID NO: 23070

SEQ ID NO: 60657 - DNA, 30 bp, Homo Sapiens; identical to SEQ ID NO: 18538

SEQ ID NO: 60658 - DNA, 31 bp, Homo Sapiens; identical to SEQ ID NO: 8268

SEQ ID NO: 60659 - DNA, 25 bp, Homo Sapiens
ttgtcaaagttaaattataggctaa

SEQ ID NO: 60660 - DNA, 31 bp, Homo Sapiens; identical to SEQ ID NO: 27207

SEQ ID NO: 60661 - DNA, 36 bp, Homo Sapiens; identical to SEQ ID NO: 13205

SEQ ID NO: 60662 - DNA, 38 bp, Homo Sapiens; identical to SEQ ID NO: 8791

SEQ ID NO: 60663 - DNA, 17 bp, Homo Sapiens
cgagccccacgttgggc

SEQ ID NO: 60664 - DNA, 38 bp, Homo Sapiens; identical to SEQ ID NO: 8357

SEQ ID NO: 60665 - DNA, 36 bp, Homo Sapiens; identical to SEQ ID NO: 8596

SEQ ID NO: 60666 - DNA, 16 bp, Homo Sapiens
aagacaggggttaggc

SEQ ID NO: 60667 - DNA, 34 bp, Homo Sapiens; identical to SEQ ID NO: 15155

SEQ ID NO: 60668 - DNA, 32 bp, Homo Sapiens; identical to SEQ ID NO: 6849

SEQ ID NO: 60669 - DNA, 31 bp, Homo Sapiens; identical to SEQ ID NO: 17840

SEQ ID NO: 60670 - DNA, 46 bp, Homo Sapiens; identical to SEQ ID NO: 8234

SEQ ID NO: 60671 - DNA, 16 bp, Homo Sapiens
gtcccttcgtggtcgc

SEQ ID NO: 60672 - DNA, 24 bp, Homo Sapiens
ttccaattaactagttttgacaac

SEQ ID NO: 60673 - DNA, 27 bp, Homo Sapiens
agaaatatgtctgataaaagagttact

SEQ ID NO: 60674 - DNA, 19 bp, Homo Sapiens
atctgaaggtcctgagttc

SEQ ID NO: 60675 - DNA, 43 bp, Homo Sapiens; identical to SEQ ID NO: 4464

SEQ ID NO: 60676 - DNA, 25 bp, Homo Sapiens
ccccgcgcaggttcgaatcctgccg

SEQ ID NO: 60677 - DNA, 37 bp, Homo Sapiens; identical to SEQ ID NO: 2324

SEQ ID NO: 60678 - DNA, 17 bp, Homo Sapiens
ttcccggccagggaacc

SEQ ID NO: 60679 - DNA, 40 bp, Homo Sapiens; identical to SEQ ID NO: 14617

SEQ ID NO: 60680 - DNA, 36 bp, Homo Sapiens; identical to SEQ ID NO: 13729

SEQ ID NO: 60681 - DNA, 36 bp, Homo Sapiens; identical to SEQ ID NO: 784

SEQ ID NO: 60682 - DNA, 39 bp, Homo Sapiens; identical to SEQ ID NO: 6035

SEQ ID NO: 60683 - DNA, 39 bp, Homo Sapiens; identical to SEQ ID NO: 12513

SEQ ID NO: 60684 - DNA, 26 bp, Homo Sapiens
ccccggttcgaaaccgggcggaaaca

SEQ ID NO: 60685 - DNA, 28 bp, Homo Sapiens
gtttaaacaaaacgaatgatttcgactc

SEQ ID NO: 60686 - DNA, 20 bp, Homo Sapiens
tcatatcattggtcgtggtt

SEQ ID NO: 60687 - DNA, 18 bp, Homo Sapiens
tcagggatgggttcgatt

SEQ ID NO: 60688 - DNA, 34 bp, Homo Sapiens; identical to SEQ ID NO: 15168

SEQ ID NO: 60689 - DNA, 38 bp, Homo Sapiens; identical to SEQ ID NO: 19126

SEQ ID NO: 60690 - DNA, 45 bp, Homo Sapiens; identical to SEQ ID NO: 28219

SEQ ID NO: 60691 - DNA, 33 bp, Homo Sapiens; identical to SEQ ID NO: 30433

SEQ ID NO: 60692 - DNA, 19 bp, Homo Sapiens
cgattcccggccaacgcac

SEQ ID NO: 60693 - DNA, 39 bp, Homo Sapiens; identical to SEQ ID NO: 14693

SEQ ID NO: 60694 - DNA, 44 bp, Homo Sapiens; identical to SEQ ID NO: 23990

SEQ ID NO: 60695 - DNA, 33 bp, Homo Sapiens; identical to SEQ ID NO: 4184

SEQ ID NO: 60696 - DNA, 39 bp, Homo Sapiens; identical to SEQ ID NO: 7504

SEQ ID NO: 60697 - DNA, 47 bp, Homo Sapiens; identical to SEQ ID NO: 14567

SEQ ID NO: 60698 - DNA, 31 bp, Homo Sapiens; identical to SEQ ID NO: 14909

SEQ ID NO: 60699 - DNA, 39 bp, Homo Sapiens; identical to SEQ ID NO: 10735

SEQ ID NO: 60700 - DNA, 40 bp, Homo Sapiens; identical to SEQ ID NO: 17119

SEQ ID NO: 60701 - DNA, 42 bp, Homo Sapiens; identical to SEQ ID NO: 24384

SEQ ID NO: 60702 - DNA, 46 bp, Homo Sapiens; identical to SEQ ID NO: 19946

SEQ ID NO: 60703 - DNA, 35 bp, Homo Sapiens; identical to SEQ ID NO: 13154

SEQ ID NO: 60704 - DNA, 35 bp, Homo Sapiens; identical to SEQ ID NO: 30954

SEQ ID NO: 60705 - DNA, 31 bp, Homo Sapiens; identical to SEQ ID NO: 963

SEQ ID NO: 60706 - DNA, 33 bp, Homo Sapiens; identical to SEQ ID NO: 28596

SEQ ID NO: 60707 - DNA, 40 bp, Homo Sapiens; identical to SEQ ID NO: 12366

SEQ ID NO: 60708 - DNA, 16 bp, Homo Sapiens
gtcccggcagagatgc

SEQ ID NO: 60709 - DNA, 34 bp, Homo Sapiens; identical to SEQ ID NO: 18602

SEQ ID NO: 60710 - DNA, 16 bp, Homo Sapiens
tcccatctggggtgcc

SEQ ID NO: 60711 - DNA, 23 bp, Homo Sapiens
ttccgggttcgagtcccggcgga

SEQ ID NO: 60712 - DNA, 28 bp, Homo Sapiens
gtccagggttcaagtccctgttcgggcg

SEQ ID NO: 60713 - DNA, 24 bp, Homo Sapiens
tccggatcagaagattgagggttc

SEQ ID NO: 60714 - DNA, 34 bp, Homo Sapiens; identical to SEQ ID NO: 27002

SEQ ID NO: 60715 - DNA, 39 bp, Homo Sapiens; identical to SEQ ID NO: 20209

SEQ ID NO: 60716 - DNA, 35 bp, Homo Sapiens; identical to SEQ ID NO: 24921

SEQ ID NO: 60717 - DNA, 40 bp, Homo Sapiens; identical to SEQ ID NO: 1547

SEQ ID NO: 60718 - DNA, 18 bp, Homo Sapiens
aaagctcacaagaactgc

SEQ ID NO: 60719 - DNA, 32 bp, Homo Sapiens; identical to SEQ ID NO: 22436

SEQ ID NO: 60720 - DNA, 37 bp, Homo Sapiens; identical to SEQ ID NO: 19761

SEQ ID NO: 60721 - DNA, 37 bp, Homo Sapiens; identical to SEQ ID NO: 6215

SEQ ID NO: 60722 - DNA, 40 bp, Homo Sapiens; identical to SEQ ID NO: 21950

SEQ ID NO: 60723 - DNA, 22 bp, Homo Sapiens
ttcgactcccggtatgggaacc

SEQ ID NO: 60724 - DNA, 19 bp, Homo Sapiens
tgaaaaagtcatggaggcc

SEQ ID NO: 60725 - DNA, 41 bp, Homo Sapiens; identical to SEQ ID NO: 13897

SEQ ID NO: 60726 - DNA, 33 bp, Homo Sapiens; identical to SEQ ID NO: 3261

SEQ ID NO: 60727 - DNA, 35 bp, Homo Sapiens; identical to SEQ ID NO: 1297

SEQ ID NO: 60728 - DNA, 26 bp, Homo Sapiens
ccagggttcaagtccctgttcaggcg

SEQ ID NO: 60729 - DNA, 46 bp, Homo Sapiens; identical to SEQ ID NO: 16069

SEQ ID NO: 60730 - DNA, 24 bp, Homo Sapiens
tcttagctttgggtgctaatggtg

SEQ ID NO: 60731 - DNA, 43 bp, Homo Sapiens; identical to SEQ ID NO: 25210

SEQ ID NO: 60732 - DNA, 32 bp, Homo Sapiens; identical to SEQ ID NO: 26787

SEQ ID NO: 60733 - DNA, 26 bp, Homo Sapiens
taacttccaattaactagttttgaca

SEQ ID NO: 60734 - DNA, 17 bp, Homo Sapiens
cttccaagcagttgacc

SEQ ID NO: 60735 - DNA, 26 bp, Homo Sapiens
agaggcttacgaccccttatttaccc

SEQ ID NO: 60736 - DNA, 33 bp, Homo Sapiens; identical to SEQ ID NO: 10615

SEQ ID NO: 60737 - DNA, 46 bp, Homo Sapiens; identical to SEQ ID NO: 28926

SEQ ID NO: 60738 - DNA, 47 bp, Homo Sapiens; identical to SEQ ID NO: 3888

SEQ ID NO: 60739 - DNA, 34 bp, Homo Sapiens; identical to SEQ ID NO: 10335

SEQ ID NO: 60740 - DNA, 21 bp, Homo Sapiens
accaaaacatcagattgtgaa

SEQ ID NO: 60741 - DNA, 27 bp, Homo Sapiens
caggagatcctgggttcgaatcccagc

SEQ ID NO: 60742 - DNA, 36 bp, Homo Sapiens; identical to SEQ ID NO: 5207

SEQ ID NO: 60743 - DNA, 42 bp, Homo Sapiens; identical to SEQ ID NO: 16485

SEQ ID NO: 60744 - DNA, 36 bp, Homo Sapiens; identical to SEQ ID NO: 6374

SEQ ID NO: 60745 - DNA, 45 bp, Homo Sapiens; identical to SEQ ID NO: 1112

SEQ ID NO: 60746 - DNA, 33 bp, Homo Sapiens; identical to SEQ ID NO: 29168

SEQ ID NO: 60747 - DNA, 16 bp, Homo Sapiens
ccagctttggggggtt

SEQ ID NO: 60748 - DNA, 19 bp, Homo Sapiens
taagctatcgggcccatac

SEQ ID NO: 60749 - DNA, 17 bp, Homo Sapiens
gtcaggatggccgagca

SEQ ID NO: 60750 - DNA, 39 bp, Homo Sapiens; identical to SEQ ID NO: 17409

SEQ ID NO: 60751 - DNA, 44 bp, Homo Sapiens; identical to SEQ ID NO: 14846

SEQ ID NO: 60752 - DNA, 17 bp, Homo Sapiens
gcagcgatggccgagtg

SEQ ID NO: 60753 - DNA, 32 bp, Homo Sapiens; identical to SEQ ID NO: 4951

SEQ ID NO: 60754 - DNA, 33 bp, Homo Sapiens; identical to SEQ ID NO: 15590

SEQ ID NO: 60755 - DNA, 41 bp, Homo Sapiens; identical to SEQ ID NO: 12431

SEQ ID NO: 60756 - DNA, 29 bp, Homo Sapiens
cgatccgagttcaaatctcggtgggacct

SEQ ID NO: 60757 - DNA, 43 bp, Homo Sapiens; identical to SEQ ID NO: 21524

SEQ ID NO: 60758 - DNA, 43 bp, Homo Sapiens; identical to SEQ ID NO: 16964

SEQ ID NO: 60759 - DNA, 44 bp, Homo Sapiens; identical to SEQ ID NO: 17121

SEQ ID NO: 60760 - DNA, 29 bp, Homo Sapiens
aagttaaattataggctaaatcctatata

SEQ ID NO: 60761 - DNA, 27 bp, Homo Sapiens
tgaatccagcgatccgagttcgagtct

SEQ ID NO: 60762 - DNA, 46 bp, Homo Sapiens; identical to SEQ ID NO: 4928

SEQ ID NO: 60763 - DNA, 26 bp, Homo Sapiens
tgggttcgaatcccacttctgacacc

SEQ ID NO: 60764 - DNA, 28 bp, Homo Sapiens
gtccgcgtgggttcgaaccccactcctg

SEQ ID NO: 60765 - DNA, 40 bp, Homo Sapiens; identical to SEQ ID NO: 25616

SEQ ID NO: 60766 - DNA, 34 bp, Homo Sapiens; identical to SEQ ID NO: 16184

SEQ ID NO: 60767 - DNA, 41 bp, Homo Sapiens; identical to SEQ ID NO: 14156

SEQ ID NO: 60768 - DNA, 33 bp, Homo Sapiens; identical to SEQ ID NO: 22607

SEQ ID NO: 60769 - DNA, 35 bp, Homo Sapiens; identical to SEQ ID NO: 4339

SEQ ID NO: 60770 - DNA, 29 bp, Homo Sapiens
aacagaggcttacgaccccttatttaccc

SEQ ID NO: 60771 - DNA, 36 bp, Homo Sapiens; identical to SEQ ID NO: 20597

SEQ ID NO: 60772 - DNA, 36 bp, Homo Sapiens; identical to SEQ ID NO: 10963

SEQ ID NO: 60773 - DNA, 16 bp, Homo Sapiens
agcttcaaacctgccg

SEQ ID NO: 60774 - DNA, 35 bp, Homo Sapiens; identical to SEQ ID NO: 15776

SEQ ID NO: 60775 - DNA, 38 bp, Homo Sapiens; identical to SEQ ID NO: 28996

SEQ ID NO: 60776 - DNA, 37 bp, Homo Sapiens; identical to SEQ ID NO: 22497

SEQ ID NO: 60777 - DNA, 29 bp, Homo Sapiens
tagctgccttccaagcagttgacccgggt

SEQ ID NO: 60778 - DNA, 34 bp, Homo Sapiens; identical to SEQ ID NO: 8564

SEQ ID NO: 60779 - DNA, 33 bp, Homo Sapiens; identical to SEQ ID NO: 6194

SEQ ID NO: 60780 - DNA, 32 bp, Homo Sapiens; identical to SEQ ID NO: 8383

SEQ ID NO: 60781 - DNA, 30 bp, Homo Sapiens; identical to SEQ ID NO: 23107

SEQ ID NO: 60782 - DNA, 26 bp, Homo Sapiens
caggttcgaatcctgttcgtgacgcc

SEQ ID NO: 60783 - DNA, 39 bp, Homo Sapiens; identical to SEQ ID NO: 23075

SEQ ID NO: 60784 - DNA, 47 bp, Homo Sapiens; identical to SEQ ID NO: 24992

SEQ ID NO: 60785 - DNA, 38 bp, Homo Sapiens; identical to SEQ ID NO: 421

SEQ ID NO: 60786 - DNA, 31 bp, Homo Sapiens; identical to SEQ ID NO: 8541

SEQ ID NO: 60787 - DNA, 36 bp, Homo Sapiens; identical to SEQ ID NO: 2630

SEQ ID NO: 60788 - DNA, 29 bp, Homo Sapiens
tgtgggttcgagtcccaccagagtcgcca

SEQ ID NO: 60789 - DNA, 37 bp, Homo Sapiens; identical to SEQ ID NO: 24903

SEQ ID NO: 60790 - DNA, 45 bp, Homo Sapiens; identical to SEQ ID NO: 2802

SEQ ID NO: 60791 - DNA, 34 bp, Homo Sapiens; identical to SEQ ID NO: 9583

SEQ ID NO: 60792 - DNA, 37 bp, Homo Sapiens; identical to SEQ ID NO: 9966

SEQ ID NO: 60793 - DNA, 25 bp, Homo Sapiens
tgggttcgaatcccagcggtgcctc

SEQ ID NO: 60794 - DNA, 35 bp, Homo Sapiens; identical to SEQ ID NO: 4818

SEQ ID NO: 60795 - DNA, 35 bp, Homo Sapiens; identical to SEQ ID NO: 24910

SEQ ID NO: 60796 - DNA, 45 bp, Homo Sapiens; identical to SEQ ID NO: 2458

SEQ ID NO: 60797 - DNA, 24 bp, Homo Sapiens
taagttgcaatacttaatttctgc

SEQ ID NO: 60798 - DNA, 45 bp, Homo Sapiens; identical to SEQ ID NO: 28053

SEQ ID NO: 60799 - DNA, 32 bp, Homo Sapiens; identical to SEQ ID NO: 9706

SEQ ID NO: 60800 - DNA, 32 bp, Homo Sapiens; identical to SEQ ID NO: 25111

SEQ ID NO: 60801 - DNA, 36 bp, Homo Sapiens; identical to SEQ ID NO: 25358

SEQ ID NO: 60802 - DNA, 35 bp, Homo Sapiens; identical to SEQ ID NO: 23071

SEQ ID NO: 60803 - DNA, 26 bp, Homo Sapiens
tccgagttcaaatctcggtgggacct

SEQ ID NO: 60804 - DNA, 18 bp, Homo Sapiens
aactgggcggaaacacca

SEQ ID NO: 60805 - DNA, 31 bp, Homo Sapiens; identical to SEQ ID NO: 24589

SEQ ID NO: 60806 - DNA, 38 bp, Homo Sapiens; identical to SEQ ID NO: 7684

SEQ ID NO: 60807 - DNA, 24 bp, Homo Sapiens
ccagggttcaagtccctgttcggg

SEQ ID NO: 60808 - DNA, 32 bp, Homo Sapiens; identical to SEQ ID NO: 19777

SEQ ID NO: 60809 - DNA, 17 bp, Homo Sapiens
tcctcacacggggcacc

SEQ ID NO: 60810 - DNA, 26 bp, Homo Sapiens
taagatggcagagcccggtaatcgca

SEQ ID NO: 60811 - DNA, 35 bp, Homo Sapiens; identical to SEQ ID NO: 24953

SEQ ID NO: 60812 - DNA, 35 bp, Homo Sapiens; identical to SEQ ID NO: 8027

SEQ ID NO: 60813 - DNA, 42 bp, Homo Sapiens; identical to SEQ ID NO: 23770

SEQ ID NO: 60814 - DNA, 16 bp, Homo Sapiens
cggatcagaagattgc

SEQ ID NO: 60815 - DNA, 44 bp, Homo Sapiens; identical to SEQ ID NO: 22002

SEQ ID NO: 60816 - DNA, 32 bp, Homo Sapiens; identical to SEQ ID NO: 2964

SEQ ID NO: 60817 - DNA, 36 bp, Homo Sapiens; identical to SEQ ID NO: 9299

SEQ ID NO: 60818 - DNA, 23 bp, Homo Sapiens
cgaggtgattttcatattgaatt

SEQ ID NO: 60819 - DNA, 19 bp, Homo Sapiens
tccccgcgcaggttcgaat

SEQ ID NO: 60820 - DNA, 23 bp, Homo Sapiens
atgtccgcgtgggttcgaacccc

SEQ ID NO: 60821 - DNA, 24 bp, Homo Sapiens
taggattcctggttttcacccagg

SEQ ID NO: 60822 - DNA, 38 bp, Homo Sapiens; identical to SEQ ID NO: 14505

SEQ ID NO: 60823 - DNA, 33 bp, Homo Sapiens; identical to SEQ ID NO: 16891

SEQ ID NO: 60824 - DNA, 33 bp, Homo Sapiens; identical to SEQ ID NO: 24447

SEQ ID NO: 60825 - DNA, 34 bp, Homo Sapiens; identical to SEQ ID NO: 14080

SEQ ID NO: 60826 - DNA, 33 bp, Homo Sapiens; identical to SEQ ID NO: 18766

SEQ ID NO: 60827 - DNA, 27 bp, Homo Sapiens
tatggtctagcggttaggattcctggt

SEQ ID NO: 60828 - DNA, 40 bp, Homo Sapiens; identical to SEQ ID NO: 25305

SEQ ID NO: 60829 - DNA, 44 bp, Homo Sapiens; identical to SEQ ID NO: 28044

SEQ ID NO: 60830 - DNA, 39 bp, Homo Sapiens; identical to SEQ ID NO: 7909

SEQ ID NO: 60831 - DNA, 33 bp, Homo Sapiens; identical to SEQ ID NO: 12702

SEQ ID NO: 60832 - DNA, 31 bp, Homo Sapiens; identical to SEQ ID NO: 23709

SEQ ID NO: 60833 - DNA, 17 bp, Homo Sapiens
aaccgagcggaaacacc

SEQ ID NO: 60834 - DNA, 35 bp, Homo Sapiens; identical to SEQ ID NO: 9065

SEQ ID NO: 60835 - DNA, 44 bp, Homo Sapiens; identical to SEQ ID NO: 10204

SEQ ID NO: 60836 - DNA, 24 bp, Homo Sapiens
cagtctcataatctgaaggtcgtg

SEQ ID NO: 60837 - DNA, 46 bp, Homo Sapiens; identical to SEQ ID NO: 26924

SEQ ID NO: 60838 - DNA, 36 bp, Homo Sapiens; identical to SEQ ID NO: 6784

SEQ ID NO: 60839 - DNA, 44 bp, Homo Sapiens; identical to SEQ ID NO: 25115

SEQ ID NO: 60840 - DNA, 42 bp, Homo Sapiens; identical to SEQ ID NO: 5446

SEQ ID NO: 60841 - DNA, 28 bp, Homo Sapiens
gttttgacaacattcaaaaaagagtacc

SEQ ID NO: 60842 - DNA, 28 bp, Homo Sapiens
attgtgggttcgagtcccatctggggtg

SEQ ID NO: 60843 - DNA, 18 bp, Homo Sapiens
aaccgagcggaaacacca

SEQ ID NO: 60844 - DNA, 33 bp, Homo Sapiens; identical to SEQ ID NO: 25761

SEQ ID NO: 60845 - DNA, 16 bp, Homo Sapiens
cccgggttcgactccc

SEQ ID NO: 60846 - DNA, 38 bp, Homo Sapiens; identical to SEQ ID NO: 31188

SEQ ID NO: 60847 - DNA, 17 bp, Homo Sapiens
tgatttcgactcattaa

SEQ ID NO: 60848 - DNA, 28 bp, Homo Sapiens
acgcgggagaccggggttcgattccccg

SEQ ID NO: 60849 - DNA, 24 bp, Homo Sapiens
ttccgtagtgtagcggttatcaca

SEQ ID NO: 60850 - DNA, 43 bp, Homo Sapiens; identical to SEQ ID NO: 22582

SEQ ID NO: 60851 - DNA, 41 bp, Homo Sapiens; identical to SEQ ID NO: 19129

SEQ ID NO: 60852 - DNA, 16 bp, Homo Sapiens
gtcgtgggttcgagcc

SEQ ID NO: 60853 - DNA, 45 bp, Homo Sapiens; identical to SEQ ID NO: 2385

SEQ ID NO: 60854 - DNA, 34 bp, Homo Sapiens; identical to SEQ ID NO: 771

SEQ ID NO: 60855 - DNA, 31 bp, Homo Sapiens; identical to SEQ ID NO: 12547

SEQ ID NO: 60856 - DNA, 24 bp, Homo Sapiens
tccaggttcgactcctggctggct

SEQ ID NO: 60857 - DNA, 47 bp, Homo Sapiens; identical to SEQ ID NO: 221

SEQ ID NO: 60858 - DNA, 46 bp, Homo Sapiens; identical to SEQ ID NO: 17587

SEQ ID NO: 60859 - DNA, 35 bp, Homo Sapiens; identical to SEQ ID NO: 2611

SEQ ID NO: 60860 - DNA, 34 bp, Homo Sapiens; identical to SEQ ID NO: 5717

SEQ ID NO: 60861 - DNA, 35 bp, Homo Sapiens; identical to SEQ ID NO: 22803

SEQ ID NO: 60862 - DNA, 21 bp, Homo Sapiens
agcgcattggacttctaattc

SEQ ID NO: 60863 - DNA, 44 bp, Homo Sapiens; identical to SEQ ID NO: 28389

SEQ ID NO: 60864 - DNA, 31 bp, Homo Sapiens; identical to SEQ ID NO: 18409

SEQ ID NO: 60865 - DNA, 21 bp, Homo Sapiens
tctcataatctgaaggtcgtg

SEQ ID NO: 60866 - DNA, 40 bp, Homo Sapiens; identical to SEQ ID NO: 26346

SEQ ID NO: 60867 - DNA, 40 bp, Homo Sapiens; identical to SEQ ID NO: 538

SEQ ID NO: 60868 - DNA, 34 bp, Homo Sapiens; identical to SEQ ID NO: 27658

SEQ ID NO: 60869 - DNA, 46 bp, Homo Sapiens; identical to SEQ ID NO: 29176

SEQ ID NO: 60870 - DNA, 47 bp, Homo Sapiens; identical to SEQ ID NO: 29124

SEQ ID NO: 60871 - DNA, 27 bp, Homo Sapiens
agtaagttgcaatacttaatttctgcc

SEQ ID NO: 60872 - DNA, 33 bp, Homo Sapiens; identical to SEQ ID NO: 7166

SEQ ID NO: 60873 - DNA, 34 bp, Homo Sapiens; identical to SEQ ID NO: 23693

SEQ ID NO: 60874 - DNA, 23 bp, Homo Sapiens
gagttcgaatctcggtgggacct

SEQ ID NO: 60875 - DNA, 32 bp, Homo Sapiens; identical to SEQ ID NO: 13255

SEQ ID NO: 60876 - DNA, 34 bp, Homo Sapiens; identical to SEQ ID NO: 18144

SEQ ID NO: 60877 - DNA, 34 bp, Homo Sapiens; identical to SEQ ID NO: 24909

SEQ ID NO: 60878 - DNA, 34 bp, Homo Sapiens; identical to SEQ ID NO: 11817

SEQ ID NO: 60879 - DNA, 47 bp, Homo Sapiens; identical to SEQ ID NO: 17455

SEQ ID NO: 60880 - DNA, 35 bp, Homo Sapiens; identical to SEQ ID NO: 29114

SEQ ID NO: 60881 - DNA, 46 bp, Homo Sapiens; identical to SEQ ID NO: 22941

SEQ ID NO: 60882 - DNA, 33 bp, Homo Sapiens; identical to SEQ ID NO: 28751

SEQ ID NO: 60883 - DNA, 34 bp, Homo Sapiens; identical to SEQ ID NO: 20149

SEQ ID NO: 60884 - DNA, 23 bp, Homo Sapiens
gggcccataccccgaaaatgttg

SEQ ID NO: 60885 - DNA, 38 bp, Homo Sapiens; identical to SEQ ID NO: 23697

SEQ ID NO: 60886 - DNA, 34 bp, Homo Sapiens; identical to SEQ ID NO: 13539

SEQ ID NO: 60887 - DNA, 39 bp, Homo Sapiens; identical to SEQ ID NO: 12767

SEQ ID NO: 60888 - DNA, 37 bp, Homo Sapiens; identical to SEQ ID NO: 20396

SEQ ID NO: 60889 - DNA, 28 bp, Homo Sapiens
tgtgggttcgagtcccatctggggtgcc

SEQ ID NO: 60890 - DNA, 32 bp, Homo Sapiens; identical to SEQ ID NO: 23654

SEQ ID NO: 60891 - DNA, 33 bp, Homo Sapiens; identical to SEQ ID NO: 4645

SEQ ID NO: 60892 - DNA, 34 bp, Homo Sapiens; identical to SEQ ID NO: 1007

SEQ ID NO: 60893 - DNA, 40 bp, Homo Sapiens; identical to SEQ ID NO: 10736

SEQ ID NO: 60894 - DNA, 44 bp, Homo Sapiens; identical to SEQ ID NO: 27571

SEQ ID NO: 60895 - DNA, 22 bp, Homo Sapiens
ttcgaatccggctcggaggacc

SEQ ID NO: 60896 - DNA, 18 bp, Homo Sapiens
aaccgggcagaaacacca

SEQ ID NO: 60897 - DNA, 39 bp, Homo Sapiens; identical to SEQ ID NO: 11188

SEQ ID NO: 60898 - DNA, 35 bp, Homo Sapiens; identical to SEQ ID NO: 24801

SEQ ID NO: 60899 - DNA, 17 bp, Homo Sapiens
tcttaatctcagggtcg

SEQ ID NO: 60900 - DNA, 42 bp, Homo Sapiens; identical to SEQ ID NO: 30984

SEQ ID NO: 60901 - DNA, 31 bp, Homo Sapiens; identical to SEQ ID NO: 13062

SEQ ID NO: 60902 - DNA, 18 bp, Homo Sapiens
aattccccgacggggagc

SEQ ID NO: 60903 - DNA, 32 bp, Homo Sapiens; identical to SEQ ID NO: 26876

SEQ ID NO: 60904 - DNA, 17 bp, Homo Sapiens
aaccgggcagaaacacc

SEQ ID NO: 60905 - DNA, 30 bp, Homo Sapiens; identical to SEQ ID NO: 23456

SEQ ID NO: 60906 - DNA, 17 bp, Homo Sapiens
aactgggcggaaacacc

SEQ ID NO: 60907 - DNA, 32 bp, Homo Sapiens; identical to SEQ ID NO: 11998

SEQ ID NO: 60908 - DNA, 37 bp, Homo Sapiens; identical to SEQ ID NO: 12198

SEQ ID NO: 60909 - DNA, 40 bp, Homo Sapiens; identical to SEQ ID NO: 25685

SEQ ID NO: 60910 - DNA, 33 bp, Homo Sapiens; identical to SEQ ID NO: 23457

SEQ ID NO: 60911 - DNA, 38 bp, Homo Sapiens; identical to SEQ ID NO: 30352

SEQ ID NO: 60912 - DNA, 45 bp, Homo Sapiens; identical to SEQ ID NO: 25385

SEQ ID NO: 60913 - DNA, 26 bp, Homo Sapiens
ccgggttcgattcccgggcggcgcac

SEQ ID NO: 60914 - DNA, 33 bp, Homo Sapiens; identical to SEQ ID NO: 18813

SEQ ID NO: 60915 - DNA, 34 bp, Homo Sapiens; identical to SEQ ID NO: 21799

SEQ ID NO: 60916 - DNA, 41 bp, Homo Sapiens; identical to SEQ ID NO: 2384

SEQ ID NO: 60917 - DNA, 31 bp, Homo Sapiens; identical to SEQ ID NO: 13254

SEQ ID NO: 60918 - DNA, 38 bp, Homo Sapiens; identical to SEQ ID NO: 20914

SEQ ID NO: 60919 - DNA, 37 bp, Homo Sapiens; identical to SEQ ID NO: 26409

SEQ ID NO: 60920 - DNA, 37 bp, Homo Sapiens; identical to SEQ ID NO: 26829

SEQ ID NO: 60921 - DNA, 31 bp, Homo Sapiens; identical to SEQ ID NO: 17568

SEQ ID NO: 60922 - DNA, 43 bp, Homo Sapiens; identical to SEQ ID NO: 1550

SEQ ID NO: 60923 - DNA, 32 bp, Homo Sapiens; identical to SEQ ID NO: 25184

SEQ ID NO: 60924 - DNA, 37 bp, Homo Sapiens; identical to SEQ ID NO: 16932

SEQ ID NO: 60925 - DNA, 18 bp, Homo Sapiens
cagggatgggttcgattc

SEQ ID NO: 60926 - DNA, 16 bp, Homo Sapiens
tcttaatcccagggtc

SEQ ID NO: 60927 - DNA, 40 bp, Homo Sapiens; identical to SEQ ID NO: 20621

SEQ ID NO: 60928 - DNA, 25 bp, Homo Sapiens
cggtagagcatgagactcttaatct

SEQ ID NO: 60929 - DNA, 24 bp, Homo Sapiens
agaagattccaggttcgactcctg

SEQ ID NO: 60930 - DNA, 30 bp, Homo Sapiens; identical to SEQ ID NO: 23689

SEQ ID NO: 60931 - DNA, 32 bp, Homo Sapiens; identical to SEQ ID NO: 17569

SEQ ID NO: 60932 - DNA, 28 bp, Homo Sapiens
agaaatatgtctgataaaagagttactt

SEQ ID NO: 60933 - DNA, 37 bp, Homo Sapiens; identical to SEQ ID NO: 20411

SEQ ID NO: 60934 - DNA, 29 bp, Homo Sapiens
gtcggtagagcatgagactcttaatctca

SEQ ID NO: 60935 - DNA, 36 bp, Homo Sapiens; identical to SEQ ID NO: 4716

SEQ ID NO: 60936 - DNA, 41 bp, Homo Sapiens; identical to SEQ ID NO: 20894

SEQ ID NO: 60937 - DNA, 32 bp, Homo Sapiens; identical to SEQ ID NO: 17369

SEQ ID NO: 60938 - DNA, 47 bp, Homo Sapiens; identical to SEQ ID NO: 977

SEQ ID NO: 60939 - DNA, 34 bp, Homo Sapiens; identical to SEQ ID NO: 23712

SEQ ID NO: 60940 - DNA, 34 bp, Homo Sapiens; identical to SEQ ID NO: 20393

SEQ ID NO: 60941 - DNA, 32 bp, Homo Sapiens; identical to SEQ ID NO: 3921

SEQ ID NO: 60942 - DNA, 35 bp, Homo Sapiens; identical to SEQ ID NO: 19221

SEQ ID NO: 60943 - DNA, 32 bp, Homo Sapiens; identical to SEQ ID NO: 23691

SEQ ID NO: 60944 - DNA, 38 bp, Homo Sapiens; identical to SEQ ID NO: 19223

SEQ ID NO: 60945 - DNA, 32 bp, Homo Sapiens; identical to SEQ ID NO: 23710

SEQ ID NO: 60946 - DNA, 29 bp, Homo Sapiens
gtcggtagagcatgggactcttaatccca

SEQ ID NO: 60947 - DNA, 35 bp, Homo Sapiens; identical to SEQ ID NO: 3924

SEQ ID NO: 60948 - DNA, 33 bp, Homo Sapiens; identical to SEQ ID NO: 23692

SEQ ID NO: 60949 - DNA, 33 bp, Homo Sapiens; identical to SEQ ID NO: 28539

SEQ ID NO: 60950 - DNA, 33 bp, Homo Sapiens; identical to SEQ ID NO: 21754

SEQ ID NO: 60951 - DNA, 39 bp, Homo Sapiens; identical to SEQ ID NO: 10071

SEQ ID NO: 60952 - DNA, 16 bp, Homo Sapiens
ccggggttcgattccc

SEQ ID NO: 60953 - DNA, 35 bp, Homo Sapiens; identical to SEQ ID NO: 2144

SEQ ID NO: 60954 - DNA, 34 bp, Homo Sapiens; identical to SEQ ID NO: 12822

SEQ ID NO: 60955 - DNA, 33 bp, Homo Sapiens; identical to SEQ ID NO: 6795

SEQ ID NO: 60956 - DNA, 41 bp, Homo Sapiens; identical to SEQ ID NO: 29687

SEQ ID NO: 60957 - DNA, 42 bp, Homo Sapiens; identical to SEQ ID NO: 1182

SEQ ID NO: 60958 - DNA, 35 bp, Homo Sapiens; identical to SEQ ID NO: 27074

SEQ ID NO: 60959 - DNA, 29 bp, Homo Sapiens
aggtggcccgggttcgactcccggtatgg

SEQ ID NO: 60960 - DNA, 27 bp, Homo Sapiens
atcagaagattctaggttcgactcctg

SEQ ID NO: 60961 - DNA, 18 bp, Homo Sapiens
tagggtgcttagctgtta

SEQ ID NO: 60962 - DNA, 28 bp, Homo Sapiens
ttggcctcctaagccagggattgtgggt

SEQ ID NO: 60963 - DNA, 33 bp, Homo Sapiens; identical to SEQ ID NO: 18716

SEQ ID NO: 60964 - DNA, 23 bp, Homo Sapiens
tagagcatgggactcttaatctc

SEQ ID NO: 60965 - DNA, 34 bp, Homo Sapiens; identical to SEQ ID NO: 8553

SEQ ID NO: 60966 - DNA, 27 bp, Homo Sapiens
gtccgcgtgggttcgaaccccactcct

SEQ ID NO: 60967 - DNA, 25 bp, Homo Sapiens
agtcggtagagcatgagacccttaa

SEQ ID NO: 60968 - DNA, 48 bp, Homo Sapiens; identical to SEQ ID NO: 13308

SEQ ID NO: 60969 - DNA, 32 bp, Homo Sapiens; identical to SEQ ID NO: 21510

SEQ ID NO: 60970 - DNA, 23 bp, Homo Sapiens
gttcaagtccctgtccaggcgcc

SEQ ID NO: 60971 - DNA, 39 bp, Homo Sapiens; identical to SEQ ID NO: 27324

SEQ ID NO: 60972 - DNA, 46 bp, Homo Sapiens; identical to SEQ ID NO: 17688

SEQ ID NO: 60973 - DNA, 33 bp, Homo Sapiens; identical to SEQ ID NO: 5037

SEQ ID NO: 60974 - DNA, 23 bp, Homo Sapiens
tgtccgcgtgggttcgaacccca

SEQ ID NO: 60975 - DNA, 25 bp, Homo Sapiens
cgggttcaaatcccggacgagcccc

SEQ ID NO: 60976 - DNA, 29 bp, Homo Sapiens
ctgagggtccagggttcatgtccctgttc

SEQ ID NO: 60977 - DNA, 27 bp, Homo Sapiens
gcaggttcgaatcctgccgactacgcc

SEQ ID NO: 60978 - DNA, 30 bp, Homo Sapiens; identical to SEQ ID NO: 7495

SEQ ID NO: 60979 - DNA, 19 bp, Homo Sapiens
tatagtggttagcatagct

SEQ ID NO: 60980 - DNA, 25 bp, Homo Sapiens
tgaggccccgggttcaatccccggc

SEQ ID NO: 60981 - DNA, 34 bp, Homo Sapiens; identical to SEQ ID NO: 19477

SEQ ID NO: 60982 - DNA, 25 bp, Homo Sapiens
attagggtgcttagctgttaactaa

SEQ ID NO: 60983 - DNA, 31 bp, Homo Sapiens; identical to SEQ ID NO: 15973

SEQ ID NO: 60984 - DNA, 33 bp, Homo Sapiens; identical to SEQ ID NO: 6857

SEQ ID NO: 60985 - DNA, 19 bp, Homo Sapiens
cgggttcgactcccggtgt

SEQ ID NO: 60986 - DNA, 32 bp, Homo Sapiens; identical to SEQ ID NO: 11544

SEQ ID NO: 60987 - DNA, 36 bp, Homo Sapiens; identical to SEQ ID NO: 20889

SEQ ID NO: 60988 - DNA, 31 bp, Homo Sapiens; identical to SEQ ID NO: 7813

SEQ ID NO: 60989 - DNA, 18 bp, Homo Sapiens
ttcgattctcatagtcct

SEQ ID NO: 60990 - DNA, 32 bp, Homo Sapiens; identical to SEQ ID NO: 20593

SEQ ID NO: 60991 - DNA, 33 bp, Homo Sapiens; identical to SEQ ID NO: 9777

SEQ ID NO: 60992 - DNA, 31 bp, Homo Sapiens; identical to SEQ ID NO: 12247

SEQ ID NO: 60993 - DNA, 46 bp, Homo Sapiens; identical to SEQ ID NO: 6246

SEQ ID NO: 60994 - DNA, 45 bp, Homo Sapiens; identical to SEQ ID NO: 15432

SEQ ID NO: 60995 - DNA, 33 bp, Homo Sapiens; identical to SEQ ID NO: 12441

SEQ ID NO: 60996 - DNA, 33 bp, Homo Sapiens; identical to SEQ ID NO: 17570

SEQ ID NO: 60997 - DNA, 30 bp, Homo Sapiens; identical to SEQ ID NO: 4326

SEQ ID NO: 60998 - DNA, 33 bp, Homo Sapiens; identical to SEQ ID NO: 15757

SEQ ID NO: 60999 - DNA, 46 bp, Homo Sapiens; identical to SEQ ID NO: 20373

SEQ ID NO: 61000 - DNA, 46 bp, Homo Sapiens; identical to SEQ ID NO: 5812

SEQ ID NO: 61001 - DNA, 24 bp, Homo Sapiens
attctcgcctgccacgcgggaggc

SEQ ID NO: 61002 - DNA, 43 bp, Homo Sapiens; identical to SEQ ID NO: 21804

SEQ ID NO: 61003 - DNA, 19 bp, Homo Sapiens
gtggtagagcgcgtgcttc

SEQ ID NO: 61004 - DNA, 40 bp, Homo Sapiens; identical to SEQ ID NO: 28462

SEQ ID NO: 61005 - DNA, 29 bp, Homo Sapiens
ttgcgttcagttgatgcagagtggggttt

SEQ ID NO: 61006 - DNA, 37 bp, Homo Sapiens; identical to SEQ ID NO: 25312

SEQ ID NO: 61007 - DNA, 28 bp, Homo Sapiens
ttcccattcttgcgacccgggttcgatt

SEQ ID NO: 61008 - DNA, 27 bp, Homo Sapiens
cagaagattccaggttcgactcctggc

SEQ ID NO: 61009 - DNA, 40 bp, Homo Sapiens; identical to SEQ ID NO: 26823

SEQ ID NO: 61010 - DNA, 34 bp, Homo Sapiens; identical to SEQ ID NO: 7818

SEQ ID NO: 61011 - DNA, 22 bp, Homo Sapiens
agagcatgagactcttaatctc

SEQ ID NO: 61012 - DNA, 34 bp, Homo Sapiens; identical to SEQ ID NO: 21850

SEQ ID NO: 61013 - DNA, 38 bp, Homo Sapiens; identical to SEQ ID NO: 2954

SEQ ID NO: 61014 - DNA, 31 bp, Homo Sapiens; identical to SEQ ID NO: 8322

SEQ ID NO: 61015 - DNA, 19 bp, Homo Sapiens
cgcattggtggttcagtgg

SEQ ID NO: 61016 - DNA, 28 bp, Homo Sapiens
attgtgggttcgagtcccacctggggtg

SEQ ID NO: 61017 - DNA, 34 bp, Homo Sapiens; identical to SEQ ID NO: 28918

SEQ ID NO: 61018 - DNA, 31 bp, Homo Sapiens; identical to SEQ ID NO: 9329

SEQ ID NO: 61019 - DNA, 32 bp, Homo Sapiens; identical to SEQ ID NO: 18812

SEQ ID NO: 61020 - DNA, 17 bp, Homo Sapiens
gccccgggttcgatccc

SEQ ID NO: 61021 - DNA, 37 bp, Homo Sapiens; identical to SEQ ID NO: 20913

SEQ ID NO: 61022 - DNA, 48 bp, Homo Sapiens; identical to SEQ ID NO: 10037

SEQ ID NO: 61023 - DNA, 41 bp, Homo Sapiens; identical to SEQ ID NO: 12602

SEQ ID NO: 61024 - DNA, 16 bp, Homo Sapiens
tggttcgagcccaccc

SEQ ID NO: 61025 - DNA, 48 bp, Homo Sapiens; identical to SEQ ID NO: 14547

SEQ ID NO: 61026 - DNA, 22 bp, Homo Sapiens
catcagattgtgaatctgacaa

SEQ ID NO: 61027 - DNA, 33 bp, Homo Sapiens; identical to SEQ ID NO: 12821

SEQ ID NO: 61028 - DNA, 29 bp, Homo Sapiens
actctgcgttgtggccgcagcaacctcgg

SEQ ID NO: 61029 - DNA, 16 bp, Homo Sapiens
tgataaaagagttact

SEQ ID NO: 61030 - DNA, 32 bp, Homo Sapiens; identical to SEQ ID NO: 15308

SEQ ID NO: 61031 - DNA, 18 bp, Homo Sapiens
tggggggttcgattcctt

SEQ ID NO: 61032 - DNA, 23 bp, Homo Sapiens
cattaaattatgataatcatatt

SEQ ID NO: 61033 - DNA, 31 bp, Homo Sapiens; identical to SEQ ID NO: 19379

SEQ ID NO: 61034 - DNA, 31 bp, Homo Sapiens; identical to SEQ ID NO: 30966

SEQ ID NO: 61035 - DNA, 42 bp, Homo Sapiens; identical to SEQ ID NO: 4555

SEQ ID NO: 61036 - DNA, 20 bp, Homo Sapiens
aatgatttcgactcattaaa

SEQ ID NO: 61037 - DNA, 27 bp, Homo Sapiens
cgtgttcaagtcacgtcggggtcacca

SEQ ID NO: 61038 - DNA, 39 bp, Homo Sapiens; identical to SEQ ID NO: 10310

SEQ ID NO: 61039 - DNA, 48 bp, Homo Sapiens; identical to SEQ ID NO: 23772

SEQ ID NO: 61040 - DNA, 23 bp, Homo Sapiens
ataaaacttaaaactttacagtc

SEQ ID NO: 61041 - DNA, 24 bp, Homo Sapiens
gctttcaccgccgcggcccgggtt

SEQ ID NO: 61042 - DNA, 30 bp, Homo Sapiens; identical to SEQ ID NO: 26623

SEQ ID NO: 61043 - DNA, 32 bp, Homo Sapiens; identical to SEQ ID NO: 11353

SEQ ID NO: 61044 - DNA, 41 bp, Homo Sapiens; identical to SEQ ID NO: 29302

SEQ ID NO: 61045 - DNA, 33 bp, Homo Sapiens; identical to SEQ ID NO: 4714

SEQ ID NO: 61046 - DNA, 16 bp, Homo Sapiens
aaccgggcagaaacac

SEQ ID NO: 61047 - DNA, 29 bp, Homo Sapiens
gaagattctaggttcgactcctggctggc

SEQ ID NO: 61048 - DNA, 29 bp, Homo Sapiens
aatatagtttaaccaaaacatcagattgt

SEQ ID NO: 61049 - DNA, 17 bp, Homo Sapiens
acttaagatccaatgga

SEQ ID NO: 61050 - DNA, 20 bp, Homo Sapiens
agtggttagagcactggtct

SEQ ID NO: 61051 - DNA, 33 bp, Homo Sapiens; identical to SEQ ID NO: 18251

SEQ ID NO: 61052 - DNA, 29 bp, Homo Sapiens
tgtagtggtatcatgcaagattcccattc

SEQ ID NO: 61053 - DNA, 33 bp, Homo Sapiens; identical to SEQ ID NO: 13075

SEQ ID NO: 61054 - DNA, 35 bp, Homo Sapiens; identical to SEQ ID NO: 10161

SEQ ID NO: 61055 - DNA, 31 bp, Homo Sapiens; identical to SEQ ID NO: 26321

SEQ ID NO: 61056 - DNA, 26 bp, Homo Sapiens
atgtctgataaaagagttactttgat

SEQ ID NO: 61057 - DNA, 26 bp, Homo Sapiens
gtggcccgggttcgactcccggtatg

SEQ ID NO: 61058 - DNA, 48 bp, Homo Sapiens; identical to SEQ ID NO: 17348

SEQ ID NO: 61059 - DNA, 28 bp, Homo Sapiens
taatcgcataaaacttaaaactttacag

SEQ ID NO: 61060 - DNA, 29 bp, Homo Sapiens
aaggtcgcgggttcgaaccccgtacgggc

SEQ ID NO: 61061 - DNA, 36 bp, Homo Sapiens; identical to SEQ ID NO: 23843

SEQ ID NO: 61062 - DNA, 26 bp, Homo Sapiens
ttaaatacagaccaagagccttcaaa

SEQ ID NO: 61063 - DNA, 25 bp, Homo Sapiens
caatacactgaaaatgtttagacgg

SEQ ID NO: 61064 - DNA, 37 bp, Homo Sapiens; identical to SEQ ID NO: 18415

SEQ ID NO: 61065 - DNA, 27 bp, Homo Sapiens
cttgtaaaccaggggtcgcgagttcaa

SEQ ID NO: 61066 - DNA, 40 bp, Homo Sapiens; identical to SEQ ID NO: 14973

SEQ ID NO: 61067 - DNA, 48 bp, Homo Sapiens; identical to SEQ ID NO: 30047

SEQ ID NO: 61068 - DNA, 29 bp, Homo Sapiens
tagagcatgagactcttaatctcagggtc

SEQ ID NO: 61069 - DNA, 34 bp, Homo Sapiens; identical to SEQ ID NO: 26407

SEQ ID NO: 61070 - DNA, 18 bp, Homo Sapiens
aatggtagaattctcgcc

SEQ ID NO: 61071 - DNA, 26 bp, Homo Sapiens
caatggacatatgtccgcgtgggttc

SEQ ID NO: 61072 - DNA, 48 bp, Homo Sapiens; identical to SEQ ID NO: 998

SEQ ID NO: 61073 - DNA, 35 bp, Homo Sapiens; identical to SEQ ID NO: 14359

SEQ ID NO: 61074 - DNA, 19 bp, Homo Sapiens
acttccaattaactagttt

SEQ ID NO: 61075 - DNA, 41 bp, Homo Sapiens; identical to SEQ ID NO: 7573

SEQ ID NO: 61076 - DNA, 29 bp, Homo Sapiens
cagggtcgtgggttcgagccccacgttgg

SEQ ID NO: 61077 - DNA, 38 bp, Homo Sapiens; identical to SEQ ID NO: 20816

SEQ ID NO: 61078 - DNA, 32 bp, Homo Sapiens; identical to SEQ ID NO: 5895

SEQ ID NO: 61079 - DNA, 47 bp, Homo Sapiens; identical to SEQ ID NO: 816

SEQ ID NO: 61080 - DNA, 40 bp, Homo Sapiens; identical to SEQ ID NO: 19243

SEQ ID NO: 61081 - DNA, 29 bp, Homo Sapiens
tgggtgctaatggtggagttaaagacttt

SEQ ID NO: 61082 - DNA, 34 bp, Homo Sapiens; identical to SEQ ID NO: 23508

SEQ ID NO: 61083 - DNA, 17 bp, Homo Sapiens
ggggtagagcatttgac

SEQ ID NO: 61084 - DNA, 33 bp, Homo Sapiens; identical to SEQ ID NO: 18001

SEQ ID NO: 61085 - DNA, 29 bp, Homo Sapiens
gcttagcttaattaaagtggctgatttgc

SEQ ID NO: 61086 - DNA, 46 bp, Homo Sapiens; identical to SEQ ID NO: 17589

SEQ ID NO: 61087 - DNA, 39 bp, Homo Sapiens; identical to SEQ ID NO: 7369

SEQ ID NO: 61088 - DNA, 17 bp, Homo Sapiens
ggattcggcgctttcac

SEQ ID NO: 61089 - DNA, 17 bp, Homo Sapiens
tggttaggattcagcgc

SEQ ID NO: 61090 - DNA, 31 bp, Homo Sapiens; identical to SEQ ID NO: 14658

SEQ ID NO: 61091 - DNA, 22 bp, Homo Sapiens
atgaggccccgggttcaatccc

SEQ ID NO: 61092 - DNA, 19 bp, Homo Sapiens
caacgatggtttttcatat

SEQ ID NO: 61093 - DNA, 35 bp, Homo Sapiens; identical to SEQ ID NO: 3189

SEQ ID NO: 61094 - DNA, 22 bp, Homo Sapiens
ttaaaggataacagctatccat

SEQ ID NO: 61095 - DNA, 24 bp, Homo Sapiens
caaaacgaatgatttcgactcatt

SEQ ID NO: 61096 - DNA, 29 bp, Homo Sapiens
ggtcgtgagttcgatcctcacacggggca

SEQ ID NO: 61097 - DNA, 32 bp, Homo Sapiens; identical to SEQ ID NO: 14659

SEQ ID NO: 61098 - DNA, 17 bp, Homo Sapiens
taaacccccttatttct

SEQ ID NO: 61099 - DNA, 48 bp, Homo Sapiens; identical to SEQ ID NO: 28350

SEQ ID NO: 61100 - DNA, 30 bp, Homo Sapiens; identical to SEQ ID NO: 9408

SEQ ID NO: 61101 - DNA, 25 bp, Homo Sapiens
ttagctgttaactaagtgtttgtgg

SEQ ID NO: 61102 - DNA, 18 bp, Homo Sapiens
gatagctcagttggtaga

SEQ ID NO: 61103 - DNA, 48 bp, Homo Sapiens; identical to SEQ ID NO: 7916

SEQ ID NO: 61104 - DNA, 39 bp, Homo Sapiens; identical to SEQ ID NO: 29037

SEQ ID NO: 61105 - DNA, 27 bp, Homo Sapiens
ggagaaagctcacaagaactgctaact

SEQ ID NO: 61106 - DNA, 22 bp, Homo Sapiens
agaattttggattctcagggat

SEQ ID NO: 61107 - DNA, 23 bp, Homo Sapiens
tcagttgatgcagagtggggttt

SEQ ID NO: 61108 - DNA, 23 bp, Homo Sapiens
attcccattcttgcgacccgggt

SEQ ID NO: 61109 - DNA, 42 bp, Homo Sapiens; identical to SEQ ID NO: 24420

SEQ ID NO: 61110 - DNA, 33 bp, Homo Sapiens; identical to SEQ ID NO: 21975

SEQ ID NO: 61111 - DNA, 42 bp, Homo Sapiens; identical to SEQ ID NO: 14564

SEQ ID NO: 61112 - DNA, 45 bp, Homo Sapiens; identical to SEQ ID NO: 15466

SEQ ID NO: 61113 - DNA, 26 bp, Homo Sapiens
ttaggattcctggttttcacccaggc

SEQ ID NO: 61114 - DNA, 19 bp, Homo Sapiens
gagcatgagactcttaatc

SEQ ID NO: 61115 - DNA, 28 bp, Homo Sapiens
gctccatagctcaggggttagagcactg

SEQ ID NO: 61116 - DNA, 28 bp, Homo Sapiens
gattgtgggttcgagtcccatctgggtc

SEQ ID NO: 61117 - DNA, 48 bp, Homo Sapiens; identical to SEQ ID NO: 18318

SEQ ID NO: 61118 - DNA, 42 bp, Homo Sapiens; identical to SEQ ID NO: 19501

SEQ ID NO: 61119 - DNA, 21 bp, Homo Sapiens
ttgtgggtttaagtcccattg

SEQ ID NO: 61120 - DNA, 29 bp, Homo Sapiens
gatttcgactcattaaattatgataatca

SEQ ID NO: 61121 - DNA, 33 bp, Homo Sapiens; identical to SEQ ID NO: 24058

SEQ ID NO: 61122 - DNA, 28 bp, Homo Sapiens
ctcagggatgggttcgattctcatagtc

SEQ ID NO: 61123 - DNA, 36 bp, Homo Sapiens; identical to SEQ ID NO: 15758

SEQ ID NO: 61124 - DNA, 28 bp, Homo Sapiens
ggcagagcccggtaatcgcataaaactt

SEQ ID NO: 61125 - DNA, 48 bp, Homo Sapiens; identical to SEQ ID NO: 24088

SEQ ID NO: 61126 - DNA, 48 bp, Homo Sapiens; identical to SEQ ID NO: 8654

SEQ ID NO: 61127 - DNA, 36 bp, Homo Sapiens; identical to SEQ ID NO: 20758

SEQ ID NO: 61128 - DNA, 36 bp, Homo Sapiens; identical to SEQ ID NO: 8433

SEQ ID NO: 61129 - DNA, 41 bp, Homo Sapiens; identical to SEQ ID NO: 16317

SEQ ID NO: 61130 - DNA, 44 bp, Homo Sapiens; identical to SEQ ID NO: 28009

SEQ ID NO: 61131 - DNA, 26 bp, Homo Sapiens
cagcggaagcgtgctgggcccataac

SEQ ID NO: 61132 - DNA, 35 bp, Homo Sapiens; identical to SEQ ID NO: 24827

SEQ ID NO: 61133 - DNA, 29 bp, Homo Sapiens
tttatgtagcttacctcctcaaagcaata

SEQ ID NO: 61134 - DNA, 20 bp, Homo Sapiens
aggctaaatcctatatatct

SEQ ID NO: 61135 - DNA, 32 bp, Homo Sapiens; identical to SEQ ID NO: 17588

SEQ ID NO: 61136 - DNA, 16 bp, Homo Sapiens
ggttaggattcagcgc

SEQ ID NO: 61137 - DNA, 46 bp, Homo Sapiens; identical to SEQ ID NO: 5099

SEQ ID NO: 61138 - DNA, 40 bp, Homo Sapiens; identical to SEQ ID NO: 19720

SEQ ID NO: 61139 - DNA, 31 bp, Homo Sapiens; identical to SEQ ID NO: 15607

SEQ ID NO: 61140 - DNA, 32 bp, Homo Sapiens; identical to SEQ ID NO: 1917

SEQ ID NO: 61141 - DNA, 42 bp, Homo Sapiens; identical to SEQ ID NO: 23716

SEQ ID NO: 61142 - DNA, 29 bp, Homo Sapiens
agagcatgggactcttaatcccagggtcg

SEQ ID NO: 61143 - DNA, 27 bp, Homo Sapiens
gtcggtagagcatgagacccttaatct

SEQ ID NO: 61144 - DNA, 19 bp, Homo Sapiens
tcgtaaaccgaagatcgcg

SEQ ID NO: 61145 - DNA, 21 bp, Homo Sapiens
taggattcggcgctttcaccg

SEQ ID NO: 61146 - DNA, 31 bp, Homo Sapiens; identical to SEQ ID NO: 10188

SEQ ID NO: 61147 - DNA, 36 bp, Homo Sapiens; identical to SEQ ID NO: 12902

SEQ ID NO: 61148 - DNA, 17 bp, Homo Sapiens
gttcgatccccgtacgg

SEQ ID NO: 61149 - DNA, 32 bp, Homo Sapiens; identical to SEQ ID NO: 10189

SEQ ID NO: 61150 - DNA, 34 bp, Homo Sapiens; identical to SEQ ID NO: 4416

SEQ ID NO: 61151 - DNA, 38 bp, Homo Sapiens; identical to SEQ ID NO: 23824

SEQ ID NO: 61152 - DNA, 33 bp, Homo Sapiens; identical to SEQ ID NO: 6748

SEQ ID NO: 61153 - DNA, 24 bp, Homo Sapiens
tcagattgtgaatctgacaacaga

SEQ ID NO: 61154 - DNA, 36 bp, Homo Sapiens; identical to SEQ ID NO: 18963

SEQ ID NO: 61155 - DNA, 34 bp, Homo Sapiens; identical to SEQ ID NO: 12901

SEQ ID NO: 61156 - DNA, 26 bp, Homo Sapiens
aattgcaaattcgaagaagcagcttc

SEQ ID NO: 61157 - DNA, 40 bp, Homo Sapiens; identical to SEQ ID NO: 27866

SEQ ID NO: 61158 - DNA, 23 bp, Homo Sapiens
ggggtcgcgagttcaaatctcgc

SEQ ID NO: 61159 - DNA, 32 bp, Homo Sapiens; identical to SEQ ID NO: 14366

SEQ ID NO: 61160 - DNA, 32 bp, Homo Sapiens; identical to SEQ ID NO: 31106

SEQ ID NO: 61161 - DNA, 17 bp, Homo Sapiens
ttcgaaccccgtccgtg

SEQ ID NO: 61162 - DNA, 26 bp, Homo Sapiens
gctggggattgtgggttcgagtccca

SEQ ID NO: 61163 - DNA, 27 bp, Homo Sapiens
atagtttaaacaaaacgaatgatttcg

SEQ ID NO: 61164 - DNA, 35 bp, Homo Sapiens; identical to SEQ ID NO: 4954

SEQ ID NO: 61165 - DNA, 44 bp, Homo Sapiens; identical to SEQ ID NO: 7407

SEQ ID NO: 61166 - DNA, 20 bp, Homo Sapiens
aggttcgaaccctgctcgct

SEQ ID NO: 61167 - DNA, 48 bp, Homo Sapiens; identical to SEQ ID NO: 59

SEQ ID NO: 61168 - DNA, 35 bp, Homo Sapiens; identical to SEQ ID NO: 16692

SEQ ID NO: 61169 - DNA, 20 bp, Homo Sapiens
tgtagtggtcatcacgttcg

SEQ ID NO: 61170 - DNA, 27 bp, Homo Sapiens
ggggcgtgggttcgaatcccaccgctg

SEQ ID NO: 61171 - DNA, 42 bp, Homo Sapiens; identical to SEQ ID NO: 13588

SEQ ID NO: 61172 - DNA, 24 bp, Homo Sapiens
gtggttatcacgtctgctttacac

SEQ ID NO: 61173 - DNA, 36 bp, Homo Sapiens; identical to SEQ ID NO: 9803

SEQ ID NO: 61174 - DNA, 34 bp, Homo Sapiens; identical to SEQ ID NO: 28007

SEQ ID NO: 61175 - DNA, 31 bp, Homo Sapiens; identical to SEQ ID NO: 12302

SEQ ID NO: 61176 - DNA, 27 bp, Homo Sapiens
cagttgattagggtgcttagctgttaa

SEQ ID NO: 61177 - DNA, 35 bp, Homo Sapiens; identical to SEQ ID NO: 25187

SEQ ID NO: 61178 - DNA, 32 bp, Homo Sapiens; identical to SEQ ID NO: 30054

SEQ ID NO: 61179 - DNA, 31 bp, Homo Sapiens; identical to SEQ ID NO: 23004

SEQ ID NO: 61180 - DNA, 36 bp, Homo Sapiens; identical to SEQ ID NO: 16663

SEQ ID NO: 61181 - DNA, 34 bp, Homo Sapiens; identical to SEQ ID NO: 3136

SEQ ID NO: 61182 - DNA, 38 bp, Homo Sapiens; identical to SEQ ID NO: 5208

SEQ ID NO: 61183 - DNA, 16 bp, Homo Sapiens
gttcgagcctcacctg

SEQ ID NO: 61184 - DNA, 33 bp, Homo Sapiens; identical to SEQ ID NO: 3271

SEQ ID NO: 61185 - DNA, 48 bp, Homo Sapiens; identical to SEQ ID NO: 12371

SEQ ID NO: 61186 - DNA, 23 bp, Homo Sapiens
gtagagcatgagacccttaatct

SEQ ID NO: 61187 - DNA, 36 bp, Homo Sapiens; identical to SEQ ID NO: 27245

SEQ ID NO: 61188 - DNA, 37 bp, Homo Sapiens; identical to SEQ ID NO: 15922

SEQ ID NO: 61189 - DNA, 40 bp, Homo Sapiens; identical to SEQ ID NO: 20818

SEQ ID NO: 61190 - DNA, 48 bp, Homo Sapiens; identical to SEQ ID NO: 23495

SEQ ID NO: 61191 - DNA, 40 bp, Homo Sapiens; identical to SEQ ID NO: 29596

SEQ ID NO: 61192 - DNA, 29 bp, Homo Sapiens
actcattaaattatgataatcatatttac

SEQ ID NO: 61193 - DNA, 33 bp, Homo Sapiens; identical to SEQ ID NO: 9859

SEQ ID NO: 61194 - DNA, 31 bp, Homo Sapiens; identical to SEQ ID NO: 24798

SEQ ID NO: 61195 - DNA, 39 bp, Homo Sapiens; identical to SEQ ID NO: 19200

SEQ ID NO: 61196 - DNA, 39 bp, Homo Sapiens; identical to SEQ ID NO: 25112

SEQ ID NO: 61197 - DNA, 31 bp, Homo Sapiens; identical to SEQ ID NO: 4260

SEQ ID NO: 61198 - DNA, 21 bp, Homo Sapiens
tcagaagattccaggttcgac

SEQ ID NO: 61199 - DNA, 29 bp, Homo Sapiens
agcactctggactttgaatccagcgatcc

SEQ ID NO: 61200 - DNA, 29 bp, Homo Sapiens
ccgtagtggagtggttatcacgttcgcct

SEQ ID NO: 61201 - DNA, 31 bp, Homo Sapiens; identical to SEQ ID NO: 26786

SEQ ID NO: 61202 - DNA, 41 bp, Homo Sapiens; identical to SEQ ID NO: 30046

SEQ ID NO: 61203 - DNA, 18 bp, Homo Sapiens
ctcataatctgaaggtcg

SEQ ID NO: 61204 - DNA, 40 bp, Homo Sapiens; identical to SEQ ID NO: 11417

SEQ ID NO: 61205 - DNA, 18 bp, Homo Sapiens
agtggtaagcatagctgc

SEQ ID NO: 61206 - DNA, 20 bp, Homo Sapiens
aaaacttaaaactttacagt

SEQ ID NO: 61207 - DNA, 32 bp, Homo Sapiens; identical to SEQ ID NO: 23051

SEQ ID NO: 61208 - DNA, 25 bp, Homo Sapiens
accaaaacatcagattgtgaatctg

SEQ ID NO: 61209 - DNA, 35 bp, Homo Sapiens; identical to SEQ ID NO: 6189

SEQ ID NO: 61210 - DNA, 28 bp, Homo Sapiens
gaggtcccgggttcgatccccagcatct

SEQ ID NO: 61211 - DNA, 27 bp, Homo Sapiens
ctctcaccgccgcggcccgggttcgat

SEQ ID NO: 61212 - DNA, 29 bp, Homo Sapiens
ttggtggtgcagtggtagaattctcgcct

SEQ ID NO: 61213 - DNA, 37 bp, Homo Sapiens; identical to SEQ ID NO: 9433

SEQ ID NO: 61214 - DNA, 42 bp, Homo Sapiens; identical to SEQ ID NO: 28478

SEQ ID NO: 61215 - DNA, 20 bp, Homo Sapiens
tagctcagtcggtagagcat

SEQ ID NO: 61216 - DNA, 35 bp, Homo Sapiens; identical to SEQ ID NO: 5206

SEQ ID NO: 61217 - DNA, 31 bp, Homo Sapiens; identical to SEQ ID NO: 10931

SEQ ID NO: 61218 - DNA, 28 bp, Homo Sapiens
tcagtctcataatctgaaggtcgtgagt

SEQ ID NO: 61219 - DNA, 16 bp, Homo Sapiens
atagctcagtggtaga

SEQ ID NO: 61220 - DNA, 48 bp, Homo Sapiens; identical to SEQ ID NO: 6769

SEQ ID NO: 61221 - DNA, 48 bp, Homo Sapiens; identical to SEQ ID NO: 12102

SEQ ID NO: 61222 - DNA, 23 bp, Homo Sapiens
taggattcggcgctttcaccgcc

SEQ ID NO: 61223 - DNA, 27 bp, Homo Sapiens
agggtcgtgggttcgagccccacgttg

SEQ ID NO: 61224 - DNA, 16 bp, Homo Sapiens
aaaaattttggtgcaa

SEQ ID NO: 61225 - DNA, 33 bp, Homo Sapiens; identical to SEQ ID NO: 9964

SEQ ID NO: 61226 - DNA, 29 bp, Homo Sapiens
tgtaatggttagcactctggactttgaat

SEQ ID NO: 61227 - DNA, 33 bp, Homo Sapiens; identical to SEQ ID NO: 8120

SEQ ID NO: 61228 - DNA, 42 bp, Homo Sapiens; identical to SEQ ID NO: 23928

SEQ ID NO: 61229 - DNA, 30 bp, Homo Sapiens; identical to SEQ ID NO: 27266

SEQ ID NO: 61230 - DNA, 31 bp, Homo Sapiens; identical to SEQ ID NO: 29224

SEQ ID NO: 61231 - DNA, 26 bp, Homo Sapiens
tcacacgcgaaaggtccccggttcga

SEQ ID NO: 61232 - DNA, 37 bp, Homo Sapiens; identical to SEQ ID NO: 19527

SEQ ID NO: 61233 - DNA, 29 bp, Homo Sapiens
ttagtatagtggtgagtatccccgcctgt

SEQ ID NO: 61234 - DNA, 32 bp, Homo Sapiens; identical to SEQ ID NO: 12248

SEQ ID NO: 61235 - DNA, 25 bp, Homo Sapiens
tcataatctgaaggtcgtgagttcg

SEQ ID NO: 61236 - DNA, 42 bp, Homo Sapiens; identical to SEQ ID NO: 13759

SEQ ID NO: 61237 - DNA, 41 bp, Homo Sapiens; identical to SEQ ID NO: 14844

SEQ ID NO: 61238 - DNA, 30 bp, Homo Sapiens; identical to SEQ ID NO: 9055

SEQ ID NO: 61239 - DNA, 36 bp, Homo Sapiens; identical to SEQ ID NO: 25868

SEQ ID NO: 61240 - DNA, 29 bp, Homo Sapiens
cagcggaagcgtgctgggcccataaccca

SEQ ID NO: 61241 - DNA, 23 bp, Homo Sapiens
gaattgcaaattcgaagaagcag

SEQ ID NO: 61242 - DNA, 31 bp, Homo Sapiens; identical to SEQ ID NO: 25062

SEQ ID NO: 61243 - DNA, 32 bp, Homo Sapiens; identical to SEQ ID NO: 18677

SEQ ID NO: 61244 - DNA, 41 bp, Homo Sapiens; identical to SEQ ID NO: 1523

SEQ ID NO: 61245 - DNA, 25 bp, Homo Sapiens
ggatagctcagtcggtagagcatca

SEQ ID NO: 61246 - DNA, 32 bp, Homo Sapiens; identical to SEQ ID NO: 12040

SEQ ID NO: 61247 - DNA, 29 bp, Homo Sapiens
cagcaacctcggttcgaatccgagtcacg

SEQ ID NO: 61248 - DNA, 32 bp, Homo Sapiens; identical to SEQ ID NO: 6952

SEQ ID NO: 61249 - DNA, 32 bp, Homo Sapiens; identical to SEQ ID NO: 3808

SEQ ID NO: 61250 - DNA, 32 bp, Homo Sapiens; identical to SEQ ID NO: 23721

SEQ ID NO: 61251 - DNA, 41 bp, Homo Sapiens; identical to SEQ ID NO: 4554

SEQ ID NO: 61252 - DNA, 35 bp, Homo Sapiens; identical to SEQ ID NO: 29696

SEQ ID NO: 61253 - DNA, 39 bp, Homo Sapiens; identical to SEQ ID NO: 15013

SEQ ID NO: 61254 - DNA, 34 bp, Homo Sapiens; identical to SEQ ID NO: 1768

SEQ ID NO: 61255 - DNA, 28 bp, Homo Sapiens
agaatagtttaaattagaatcttagctt

SEQ ID NO: 61256 - DNA, 21 bp, Homo Sapiens
atgctttgcacgtatgaggcc

SEQ ID NO: 61257 - DNA, 21 bp, Homo Sapiens
tgtgatggccgagtggttaag

SEQ ID NO: 61258 - DNA, 43 bp, Homo Sapiens; identical to SEQ ID NO: 30472

SEQ ID NO: 61259 - DNA, 28 bp, Homo Sapiens
tcagtggtagaattctcgcctgccacgc

SEQ ID NO: 61260 - DNA, 17 bp, Homo Sapiens
tggttagcatagctgcc

SEQ ID NO: 61261 - DNA, 29 bp, Homo Sapiens
tctgaaggtcgtgagttcgagcctcacac

SEQ ID NO: 61262 - DNA, 27 bp, Homo Sapiens
aagttaaattataggctaaatcctata

SEQ ID NO: 61263 - DNA, 17 bp, Homo Sapiens
cagtcagtagagcatca

SEQ ID NO: 61264 - DNA, 32 bp, Homo Sapiens; identical to SEQ ID NO: 29950

SEQ ID NO: 61265 - DNA, 19 bp, Homo Sapiens
gttggtagagcatgggact

SEQ ID NO: 61266 - DNA, 32 bp, Homo Sapiens; identical to SEQ ID NO: 10687

SEQ ID NO: 61267 - DNA, 33 bp, Homo Sapiens; identical to SEQ ID NO: 761

SEQ ID NO: 61268 - DNA, 35 bp, Homo Sapiens; identical to SEQ ID NO: 12750

SEQ ID NO: 61269 - DNA, 33 bp, Homo Sapiens; identical to SEQ ID NO: 23722

SEQ ID NO: 61270 - DNA, 23 bp, Homo Sapiens
cgatccgagttcgagtctcggtg

SEQ ID NO: 61271 - DNA, 47 bp, Homo Sapiens; identical to SEQ ID NO: 7579

SEQ ID NO: 61272 - DNA, 48 bp, Homo Sapiens; identical to SEQ ID NO: 12483

SEQ ID NO: 61273 - DNA, 32 bp, Homo Sapiens; identical to SEQ ID NO: 30424

SEQ ID NO: 61274 - DNA, 23 bp, Homo Sapiens
atatgtctgataaaagagttact

SEQ ID NO: 61275 - DNA, 28 bp, Homo Sapiens
ttttagtataaatagtaccgttaacttc

SEQ ID NO: 61276 - DNA, 23 bp, Homo Sapiens
caatggggtctccccgcgcaggt

SEQ ID NO: 61277 - DNA, 18 bp, Homo Sapiens
gtgggtagagcatcagac

SEQ ID NO: 61278 - DNA, 37 bp, Homo Sapiens; identical to SEQ ID NO: 30676

SEQ ID NO: 61279 - DNA, 23 bp, Homo Sapiens
taagagaaccaacacctctttac

SEQ ID NO: 61280 - DNA, 42 bp, Homo Sapiens; identical to SEQ ID NO: 7129

SEQ ID NO: 61281 - DNA, 19 bp, Homo Sapiens
gtccgcgtgggttcgaacc

SEQ ID NO: 61282 - DNA, 45 bp, Homo Sapiens; identical to SEQ ID NO: 17637

SEQ ID NO: 61283 - DNA, 16 bp, Homo Sapiens
tttgatagagtaaata

SEQ ID NO: 61284 - DNA, 37 bp, Homo Sapiens; identical to SEQ ID NO: 14327

SEQ ID NO: 61285 - DNA, 29 bp, Homo Sapiens
tcagaaggttgcgtgttcaagtcacgtcg

SEQ ID NO: 61286 - DNA, 24 bp, Homo Sapiens
tttatgtagcttacctcctcaaag

SEQ ID NO: 61287 - DNA, 34 bp, Homo Sapiens; identical to SEQ ID NO: 15127

SEQ ID NO: 61288 - DNA, 33 bp, Homo Sapiens; identical to SEQ ID NO: 21012

SEQ ID NO: 61289 - DNA, 27 bp, Homo Sapiens
ctcaccgccgcggcccgggttcgattc

SEQ ID NO: 61290 - DNA, 31 bp, Homo Sapiens; identical to SEQ ID NO: 10959

SEQ ID NO: 61291 - DNA, 16 bp, Homo Sapiens
taatggtgagcactct

SEQ ID NO: 61292 - DNA, 22 bp, Homo Sapiens
gtccgcgtgggttcgaacccca

SEQ ID NO: 61293 - DNA, 22 bp, Homo Sapiens
atcagaagattccaggttcgac

SEQ ID NO: 61294 - DNA, 33 bp, Homo Sapiens; identical to SEQ ID NO: 19369

SEQ ID NO: 61295 - DNA, 16 bp, Homo Sapiens
ctcttagcgcagtggg

SEQ ID NO: 61296 - DNA, 36 bp, Homo Sapiens; identical to SEQ ID NO: 19222

SEQ ID NO: 61297 - DNA, 48 bp, Homo Sapiens; identical to SEQ ID NO: 18379

SEQ ID NO: 61298 - DNA, 27 bp, Homo Sapiens
atcttagctttgggtgctaatggtgga

SEQ ID NO: 61299 - DNA, 18 bp, Homo Sapiens
caatggaggcgtgggttc

SEQ ID NO: 61300 - DNA, 28 bp, Homo Sapiens
cagaagattccaggttcgactcctggct

SEQ ID NO: 61301 - DNA, 20 bp, Homo Sapiens
tcataatctgaaggtcgtga

SEQ ID NO: 61302 - DNA, 32 bp, Homo Sapiens; identical to SEQ ID NO: 29099

SEQ ID NO: 61303 - DNA, 31 bp, Homo Sapiens; identical to SEQ ID NO: 8279

SEQ ID NO: 61304 - DNA, 25 bp, Homo Sapiens
ctaagtgtttgtgggtttaagtccc

SEQ ID NO: 61305 - DNA, 30 bp, Homo Sapiens; identical to SEQ ID NO: 26320

SEQ ID NO: 61306 - DNA, 34 bp, Homo Sapiens; identical to SEQ ID NO: 14298

SEQ ID NO: 61307 - DNA, 34 bp, Homo Sapiens; identical to SEQ ID NO: 21823

SEQ ID NO: 61308 - DNA, 48 bp, Homo Sapiens; identical to SEQ ID NO: 16444

SEQ ID NO: 61309 - DNA, 31 bp, Homo Sapiens; identical to SEQ ID NO: 14077

SEQ ID NO: 61310 - DNA, 37 bp, Homo Sapiens; identical to SEQ ID NO: 1427

SEQ ID NO: 61311 - DNA, 34 bp, Homo Sapiens; identical to SEQ ID NO: 867

SEQ ID NO: 61312 - DNA, 25 bp, Homo Sapiens
atcagattgtgaatctgacaacaga

SEQ ID NO: 61313 - DNA, 28 bp, Homo Sapiens
gtcgtgagttcgatcctcacacggggca

SEQ ID NO: 61314 - DNA, 43 bp, Homo Sapiens; identical to SEQ ID NO: 20372

SEQ ID NO: 61315 - DNA, 18 bp, Homo Sapiens
ctggtgtagtggtatcat

SEQ ID NO: 61316 - DNA, 47 bp, Homo Sapiens; identical to SEQ ID NO: 12101

SEQ ID NO: 61317 - DNA, 18 bp, Homo Sapiens
taggtagcgcatcagtct

SEQ ID NO: 61318 - DNA, 26 bp, Homo Sapiens
cgcctgccacgcgggaggcccgggtt

SEQ ID NO: 61319 - DNA, 43 bp, Homo Sapiens; identical to SEQ ID NO: 19130

SEQ ID NO: 61320 - DNA, 34 bp, Homo Sapiens; identical to SEQ ID NO: 29186

SEQ ID NO: 61321 - DNA, 26 bp, Homo Sapiens
ttttggtgcaactccaaataaaagta

SEQ ID NO: 61322 - DNA, 36 bp, Homo Sapiens; identical to SEQ ID NO: 9779

SEQ ID NO: 61323 - DNA, 33 bp, Homo Sapiens; identical to SEQ ID NO: 16542

SEQ ID NO: 61324 - DNA, 20 bp, Homo Sapiens
atcagaaggctgcgtgttcg

SEQ ID NO: 61325 - DNA, 48 bp, Homo Sapiens; identical to SEQ ID NO: 14981

SEQ ID NO: 61326 - DNA, 35 bp, Homo Sapiens; identical to SEQ ID NO: 20574

SEQ ID NO: 61327 - DNA, 40 bp, Homo Sapiens; identical to SEQ ID NO: 23812

SEQ ID NO: 61328 - DNA, 27 bp, Homo Sapiens
atgaggccccgggttcgatccccggca

SEQ ID NO: 61329 - DNA, 31 bp, Homo Sapiens; identical to SEQ ID NO: 18841

SEQ ID NO: 61330 - DNA, 32 bp, Homo Sapiens; identical to SEQ ID NO: 25760

SEQ ID NO: 61331 - DNA, 34 bp, Homo Sapiens; identical to SEQ ID NO: 2365

SEQ ID NO: 61332 - DNA, 43 bp, Homo Sapiens; identical to SEQ ID NO: 21782

SEQ ID NO: 61333 - DNA, 30 bp, Homo Sapiens; identical to SEQ ID NO: 8321

SEQ ID NO: 61334 - DNA, 48 bp, Homo Sapiens; identical to SEQ ID NO: 13921

SEQ ID NO: 61335 - DNA, 30 bp, Homo Sapiens; identical to SEQ ID NO: 17141

SEQ ID NO: 61336 - DNA, 30 bp, Homo Sapiens; identical to SEQ ID NO: 5130

SEQ ID NO: 61337 - DNA, 29 bp, Homo Sapiens
ctcctcgttagtatagtggtgagtatccc

SEQ ID NO: 61338 - DNA, 34 bp, Homo Sapiens; identical to SEQ ID NO: 3107

SEQ ID NO: 61339 - DNA, 21 bp, Homo Sapiens
cctaatggataaggcactggc

SEQ ID NO: 61340 - DNA, 19 bp, Homo Sapiens
gtgttcaagtcacgtcggg

SEQ ID NO: 61341 - DNA, 17 bp, Homo Sapiens
aaaccatttcataactt

SEQ ID NO: 61342 - DNA, 25 bp, Homo Sapiens
gtaatcgcataaaacttaaaacttt

SEQ ID NO: 61343 - DNA, 29 bp, Homo Sapiens
cgcagcaacctcggttcgaatccgagtca

SEQ ID NO: 61344 - DNA, 30 bp, Homo Sapiens; identical to SEQ ID NO: 4733

SEQ ID NO: 61345 - DNA, 35 bp, Homo Sapiens; identical to SEQ ID NO: 2044

SEQ ID NO: 61346 - DNA, 26 bp, Homo Sapiens
ctgataaaagagttactttgatagag

SEQ ID NO: 61347 - DNA, 34 bp, Homo Sapiens; identical to SEQ ID NO: 16730

SEQ ID NO: 61348 - DNA, 45 bp, Homo Sapiens; identical to SEQ ID NO: 20414

SEQ ID NO: 61349 - DNA, 39 bp, Homo Sapiens; identical to SEQ ID NO: 15139

SEQ ID NO: 61350 - DNA, 35 bp, Homo Sapiens; identical to SEQ ID NO: 23360

SEQ ID NO: 61351 - DNA, 27 bp, Homo Sapiens
aaagcaatacactgaaaatgtttagac

SEQ ID NO: 61352 - DNA, 44 bp, Homo Sapiens; identical to SEQ ID NO: 1328

SEQ ID NO: 61353 - DNA, 29 bp, Homo Sapiens
atccattggtcttaggccccaaaaatttt

SEQ ID NO: 61354 - DNA, 27 bp, Homo Sapiens
caggtggcccgggttcgactcccggta

SEQ ID NO: 61355 - DNA, 45 bp, Homo Sapiens; identical to SEQ ID NO: 23913

SEQ ID NO: 61356 - DNA, 37 bp, Homo Sapiens; identical to SEQ ID NO: 9219

SEQ ID NO: 61357 - DNA, 31 bp, Homo Sapiens; identical to SEQ ID NO: 15400

SEQ ID NO: 61358 - DNA, 32 bp, Homo Sapiens; identical to SEQ ID NO: 11032

SEQ ID NO: 61359 - DNA, 32 bp, Homo Sapiens; identical to SEQ ID NO: 25979

SEQ ID NO: 61360 - DNA, 37 bp, Homo Sapiens; identical to SEQ ID NO: 26704

SEQ ID NO: 61361 - DNA, 40 bp, Homo Sapiens; identical to SEQ ID NO: 11251

SEQ ID NO: 61362 - DNA, 34 bp, Homo Sapiens; identical to SEQ ID NO: 6350

SEQ ID NO: 61363 - DNA, 31 bp, Homo Sapiens; identical to SEQ ID NO: 15010

SEQ ID NO: 61364 - DNA, 34 bp, Homo Sapiens; identical to SEQ ID NO: 16597

SEQ ID NO: 61365 - DNA, 35 bp, Homo Sapiens; identical to SEQ ID NO: 1481

SEQ ID NO: 61366 - DNA, 26 bp, Homo Sapiens
acccaacttacacttaggagatttca

SEQ ID NO: 61367 - DNA, 34 bp, Homo Sapiens; identical to SEQ ID NO: 1489

SEQ ID NO: 61368 - DNA, 19 bp, Homo Sapiens
gttgaaatacaacgatggt

SEQ ID NO: 61369 - DNA, 33 bp, Homo Sapiens; identical to SEQ ID NO: 16698

SEQ ID NO: 61370 - DNA, 48 bp, Homo Sapiens; identical to SEQ ID NO: 8764

SEQ ID NO: 61371 - DNA, 31 bp, Homo Sapiens; identical to SEQ ID NO: 17977

SEQ ID NO: 61372 - DNA, 24 bp, Homo Sapiens
aacagaggcttacgaccccttatt

SEQ ID NO: 61373 - DNA, 41 bp, Homo Sapiens; identical to SEQ ID NO: 17828

SEQ ID NO: 61374 - DNA, 27 bp, Homo Sapiens
gtgctaatggtggagttaaagactttt

SEQ ID NO: 61375 - DNA, 34 bp, Homo Sapiens; identical to SEQ ID NO: 17726

SEQ ID NO: 61376 - DNA, 38 bp, Homo Sapiens; identical to SEQ ID NO: 22693

SEQ ID NO: 61377 - DNA, 29 bp, Homo Sapiens
cggaggcgtgggttcgaatcccaccgctg

SEQ ID NO: 61378 - DNA, 34 bp, Homo Sapiens; identical to SEQ ID NO: 4384

SEQ ID NO: 61379 - DNA, 37 bp, Homo Sapiens; identical to SEQ ID NO: 12903

SEQ ID NO: 61380 - DNA, 45 bp, Homo Sapiens; identical to SEQ ID NO: 19314

SEQ ID NO: 61381 - DNA, 37 bp, Homo Sapiens; identical to SEQ ID NO: 28537

SEQ ID NO: 61382 - DNA, 32 bp, Homo Sapiens; identical to SEQ ID NO: 11147

SEQ ID NO: 61383 - DNA, 48 bp, Homo Sapiens; identical to SEQ ID NO: 10680

SEQ ID NO: 61384 - DNA, 30 bp, Homo Sapiens; identical to SEQ ID NO: 26938

SEQ ID NO: 61385 - DNA, 29 bp, Homo Sapiens
gccctcagtaagttgcaatacttaatttc

SEQ ID NO: 61386 - DNA, 28 bp, Homo Sapiens
cagcggaagcgtgctgggcccataaccc

SEQ ID NO: 61387 - DNA, 48 bp, Homo Sapiens; identical to SEQ ID NO: 3325

SEQ ID NO: 61388 - DNA, 34 bp, Homo Sapiens; identical to SEQ ID NO: 5072

SEQ ID NO: 61389 - DNA, 21 bp, Homo Sapiens
tgaaaccagctttggggggtt

SEQ ID NO: 61390 - DNA, 20 bp, Homo Sapiens
attttggtgcaactccaaat

SEQ ID NO: 61391 - DNA, 32 bp, Homo Sapiens; identical to SEQ ID NO: 448

SEQ ID NO: 61392 - DNA, 38 bp, Homo Sapiens; identical to SEQ ID NO: 12752

SEQ ID NO: 61393 - DNA, 34 bp, Homo Sapiens; identical to SEQ ID NO: 6678

SEQ ID NO: 61394 - DNA, 19 bp, Homo Sapiens
taattcaaaggttccgggt

SEQ ID NO: 61395 - DNA, 31 bp, Homo Sapiens; identical to SEQ ID NO: 26658

SEQ ID NO: 61396 - DNA, 19 bp, Homo Sapiens
gtatcatgcaagattccca

SEQ ID NO: 61397 - DNA, 40 bp, Homo Sapiens; identical to SEQ ID NO: 30707

SEQ ID NO: 61398 - DNA, 28 bp, Homo Sapiens
catgatcgtatagtggttagtactctgc

SEQ ID NO: 61399 - DNA, 38 bp, Homo Sapiens; identical to SEQ ID NO: 2340

SEQ ID NO: 61400 - DNA, 33 bp, Homo Sapiens; identical to SEQ ID NO: 13988

SEQ ID NO: 61401 - DNA, 29 bp, Homo Sapiens
tggtatagtggtgagcatagctgccttcc

SEQ ID NO: 61402 - DNA, 48 bp, Homo Sapiens; identical to SEQ ID NO: 3662

SEQ ID NO: 61403 - DNA, 19 bp, Homo Sapiens
cctggtggtctagtggcta

SEQ ID NO: 61404 - DNA, 19 bp, Homo Sapiens
agctgttaactaagtgttt

SEQ ID NO: 61405 - DNA, 24 bp, Homo Sapiens
atggacatatgtccgcgtgggttc

SEQ ID NO: 61406 - DNA, 35 bp, Homo Sapiens; identical to SEQ ID NO: 16405

SEQ ID NO: 61407 - DNA, 33 bp, Homo Sapiens; identical to SEQ ID NO: 25863

SEQ ID NO: 61408 - DNA, 41 bp, Homo Sapiens; identical to SEQ ID NO: 20161

SEQ ID NO: 61409 - DNA, 29 bp, Homo Sapiens
cagttgacccgggttcgattcccggccaa

SEQ ID NO: 61410 - DNA, 25 bp, Homo Sapiens
tctgaatccagcgatccgagttcga

SEQ ID NO: 61411 - DNA, 16 bp, Homo Sapiens
accgagcggaaacacc

SEQ ID NO: 61412 - DNA, 30 bp, Homo Sapiens; identical to SEQ ID NO: 6826

SEQ ID NO: 61413 - DNA, 34 bp, Homo Sapiens; identical to SEQ ID NO: 783

SEQ ID NO: 61414 - DNA, 30 bp, Homo Sapiens; identical to SEQ ID NO: 19403

SEQ ID NO: 61415 - DNA, 23 bp, Homo Sapiens
tagagcatcagacttttaatctg

SEQ ID NO: 61416 - DNA, 31 bp, Homo Sapiens; identical to SEQ ID NO: 24950

SEQ ID NO: 61417 - DNA, 29 bp, Homo Sapiens
tgcacgcgtgggttcgaatcccatcctcg

SEQ ID NO: 61418 - DNA, 37 bp, Homo Sapiens; identical to SEQ ID NO: 5419

SEQ ID NO: 61419 - DNA, 30 bp, Homo Sapiens; identical to SEQ ID NO: 7682

SEQ ID NO: 61420 - DNA, 27 bp, Homo Sapiens
agaggtcgatggatcgaaaccatcctc

SEQ ID NO: 61421 - DNA, 32 bp, Homo Sapiens; identical to SEQ ID NO: 13057

SEQ ID NO: 61422 - DNA, 38 bp, Homo Sapiens; identical to SEQ ID NO: 12098

SEQ ID NO: 61423 - DNA, 35 bp, Homo Sapiens; identical to SEQ ID NO: 2337

SEQ ID NO: 61424 - DNA, 32 bp, Homo Sapiens; identical to SEQ ID NO: 21946

SEQ ID NO: 61425 - DNA, 24 bp, Homo Sapiens
cttagctgttaactaagtgtttgt

SEQ ID NO: 61426 - DNA, 22 bp, Homo Sapiens
acccagtggcctaatggataag

SEQ ID NO: 61427 - DNA, 28 bp, Homo Sapiens
cgcagaaggtcctgggttcgagccccag

SEQ ID NO: 61428 - DNA, 34 bp, Homo Sapiens; identical to SEQ ID NO: 21361

SEQ ID NO: 61429 - DNA, 40 bp, Homo Sapiens; identical to SEQ ID NO: 30793

SEQ ID NO: 61430 - DNA, 19 bp, Homo Sapiens
taaataataggagcttaaa

SEQ ID NO: 61431 - DNA, 23 bp, Homo Sapiens
aggttcaattcctcttcttaaca

SEQ ID NO: 61432 - DNA, 35 bp, Homo Sapiens; identical to SEQ ID NO: 11542

SEQ ID NO: 61433 - DNA, 18 bp, Homo Sapiens
tttggattctcagggatg

SEQ ID NO: 61434 - DNA, 44 bp, Homo Sapiens; identical to SEQ ID NO: 27956

SEQ ID NO: 61435 - DNA, 35 bp, Homo Sapiens; identical to SEQ ID NO: 31013

SEQ ID NO: 61436 - DNA, 38 bp, Homo Sapiens; identical to SEQ ID NO: 14843

SEQ ID NO: 61437 - DNA, 31 bp, Homo Sapiens; identical to SEQ ID NO: 23401

SEQ ID NO: 61438 - DNA, 27 bp, Homo Sapiens
ccggggttcaagtccctgttcgggcgc

SEQ ID NO: 61439 - DNA, 48 bp, Homo Sapiens; identical to SEQ ID NO: 23238

SEQ ID NO: 61440 - DNA, 33 bp, Homo Sapiens; identical to SEQ ID NO: 6349

SEQ ID NO: 61441 - DNA, 19 bp, Homo Sapiens
cataactttgtcaaagtta

SEQ ID NO: 61442 - DNA, 30 bp, Homo Sapiens; identical to SEQ ID NO: 19631

SEQ ID NO: 61443 - DNA, 34 bp, Homo Sapiens; identical to SEQ ID NO: 4819

SEQ ID NO: 61444 - DNA, 36 bp, Homo Sapiens; identical to SEQ ID NO: 11558

SEQ ID NO: 61445 - DNA, 26 bp, Homo Sapiens
caagcagttgacccgggttcgattcc

SEQ ID NO: 61446 - DNA, 16 bp, Homo Sapiens
tctccaatggaggcgt

SEQ ID NO: 61447 - DNA, 38 bp, Homo Sapiens; identical to SEQ ID NO: 8878

SEQ ID NO: 61448 - DNA, 19 bp, Homo Sapiens
tttcataactttgtcaaag

SEQ ID NO: 61449 - DNA, 19 bp, Homo Sapiens
tgtagcggttatcacattc

SEQ ID NO: 61450 - DNA, 26 bp, Homo Sapiens
ttactttgatagagtaaataatagga

SEQ ID NO: 61451 - DNA, 28 bp, Homo Sapiens
ctcgcctgccacgcgggaggcccgggtt

SEQ ID NO: 61452 - DNA, 31 bp, Homo Sapiens; identical to SEQ ID NO: 3523

SEQ ID NO: 61453 - DNA, 48 bp, Homo Sapiens; identical to SEQ ID NO: 16935

SEQ ID NO: 61454 - DNA, 42 bp, Homo Sapiens; identical to SEQ ID NO: 6380

SEQ ID NO: 61455 - DNA, 26 bp, Homo Sapiens
atcgcataaaacttaaaactttacag

SEQ ID NO: 61456 - DNA, 43 bp, Homo Sapiens; identical to SEQ ID NO: 7575

SEQ ID NO: 61457 - DNA, 27 bp, Homo Sapiens
agatcctgggttcgaatcccagcggtg

SEQ ID NO: 61458 - DNA, 20 bp, Homo Sapiens
tttgtcaaagttaaattata

SEQ ID NO: 61459 - DNA, 19 bp, Homo Sapiens
tttgtcaaagttaaattat

SEQ ID NO: 61460 - DNA, 48 bp, Homo Sapiens; identical to SEQ ID NO: 1630

SEQ ID NO: 61461 - DNA, 25 bp, Homo Sapiens
cgggggcgtgggttcgaatcccacc

SEQ ID NO: 61462 - DNA, 42 bp, Homo Sapiens; identical to SEQ ID NO: 2194

SEQ ID NO: 61463 - DNA, 20 bp, Homo Sapiens
acaacgatggtttttcatat

SEQ ID NO: 61464 - DNA, 44 bp, Homo Sapiens; identical to SEQ ID NO: 30473

SEQ ID NO: 61465 - DNA, 32 bp, Homo Sapiens; identical to SEQ ID NO: 2752

SEQ ID NO: 61466 - DNA, 27 bp, Homo Sapiens
ccatgtctaacaacatggctttctcac

SEQ ID NO: 61467 - DNA, 22 bp, Homo Sapiens
cccataccccgaaaatgttggt

SEQ ID NO: 61468 - DNA, 23 bp, Homo Sapiens
cagctttggggggttcgattcct

SEQ ID NO: 61469 - DNA, 36 bp, Homo Sapiens; identical to SEQ ID NO: 20912

SEQ ID NO: 61470 - DNA, 29 bp, Homo Sapiens
cataatctgaaggtcgtgagttcgagcct

SEQ ID NO: 61471 - DNA, 21 bp, Homo Sapiens
gggtggttcagtggtagaatt

SEQ ID NO: 61472 - DNA, 31 bp, Homo Sapiens; identical to SEQ ID NO: 10114

SEQ ID NO: 61473 - DNA, 19 bp, Homo Sapiens
gctttgcacgtatgaggcc

SEQ ID NO: 61474 - DNA, 32 bp, Homo Sapiens; identical to SEQ ID NO: 15801

SEQ ID NO: 61475 - DNA, 32 bp, Homo Sapiens; identical to SEQ ID NO: 8248

SEQ ID NO: 61476 - DNA, 22 bp, Homo Sapiens
gtcaaagttaaattataggcta

SEQ ID NO: 61477 - DNA, 31 bp, Homo Sapiens; identical to SEQ ID NO: 9043

SEQ ID NO: 61478 - DNA, 23 bp, Homo Sapiens
gtggtgagcatagctgccttcca

SEQ ID NO: 61479 - DNA, 24 bp, Homo Sapiens
tgagcatagctgccttccaagcag

SEQ ID NO: 61480 - DNA, 20 bp, Homo Sapiens
aggcgtgggttcgaatccca

SEQ ID NO: 61481 - DNA, 39 bp, Homo Sapiens; identical to SEQ ID NO: 20159

SEQ ID NO: 61482 - DNA, 32 bp, Homo Sapiens; identical to SEQ ID NO: 16529

SEQ ID NO: 61483 - DNA, 35 bp, Homo Sapiens; identical to SEQ ID NO: 5853

SEQ ID NO: 61484 - DNA, 39 bp, Homo Sapiens; identical to SEQ ID NO: 27753

SEQ ID NO: 61485 - DNA, 23 bp, Homo Sapiens
ctgaaggtcgtgagttcgagcct

SEQ ID NO: 61486 - DNA, 23 bp, Homo Sapiens
atagtgtagtggttatcacgtct

SEQ ID NO: 61487 - DNA, 45 bp, Homo Sapiens; identical to SEQ ID NO: 23236

SEQ ID NO: 61488 - DNA, 39 bp, Homo Sapiens; identical to SEQ ID NO: 7539

SEQ ID NO: 61489 - DNA, 30 bp, Homo Sapiens; identical to SEQ ID NO: 16394

SEQ ID NO: 61490 - DNA, 38 bp, Homo Sapiens; identical to SEQ ID NO: 7570

SEQ ID NO: 61491 - DNA, 46 bp, Homo Sapiens; identical to SEQ ID NO: 17899

SEQ ID NO: 61492 - DNA, 28 bp, Homo Sapiens
tcggaggcgtgggttcgaatcccaccgc

SEQ ID NO: 61493 - DNA, 29 bp, Homo Sapiens
gaaggctgcgtgttcgaatcacgtcgggg

SEQ ID NO: 61494 - DNA, 16 bp, Homo Sapiens
ttagcgcagtaggtag

SEQ ID NO: 61495 - DNA, 30 bp, Homo Sapiens; identical to SEQ ID NO: 9228

SEQ ID NO: 61496 - DNA, 33 bp, Homo Sapiens; identical to SEQ ID NO: 18529

SEQ ID NO: 61497 - DNA, 40 bp, Homo Sapiens; identical to SEQ ID NO: 17827

SEQ ID NO: 61498 - DNA, 30 bp, Homo Sapiens; identical to SEQ ID NO: 12052

SEQ ID NO: 61499 - DNA, 30 bp, Homo Sapiens; identical to SEQ ID NO: 18489

SEQ ID NO: 61500 - DNA, 46 bp, Homo Sapiens; identical to SEQ ID NO: 7011

SEQ ID NO: 61501 - DNA, 17 bp, Homo Sapiens
caacgatggtttttcat

SEQ ID NO: 61502 - DNA, 27 bp, Homo Sapiens
gggggcatagctcagtggtagagcatt

SEQ ID NO: 61503 - DNA, 19 bp, Homo Sapiens
ccctggtggtctagtggct

SEQ ID NO: 61504 - DNA, 48 bp, Homo Sapiens; identical to SEQ ID NO: 1889

SEQ ID NO: 61505 - DNA, 29 bp, Homo Sapiens
acgcgggagaccggggttcaattccccga

SEQ ID NO: 61506 - DNA, 19 bp, Homo Sapiens
taaaacttaaaactttaca

SEQ ID NO: 61507 - DNA, 36 bp, Homo Sapiens; identical to SEQ ID NO: 16345

SEQ ID NO: 61508 - DNA, 21 bp, Homo Sapiens
taggagcttaaacccccttat

SEQ ID NO: 61509 - DNA, 33 bp, Homo Sapiens; identical to SEQ ID NO: 24951

SEQ ID NO: 61510 - DNA, 39 bp, Homo Sapiens; identical to SEQ ID NO: 12099

SEQ ID NO: 61511 - DNA, 34 bp, Homo Sapiens; identical to SEQ ID NO: 24381

SEQ ID NO: 61512 - DNA, 27 bp, Homo Sapiens
tgtagtggtatcatgcaagattcccat

SEQ ID NO: 61513 - DNA, 19 bp, Homo Sapiens
cttaattaaagtggctgat

SEQ ID NO: 61514 - DNA, 40 bp, Homo Sapiens; identical to SEQ ID NO: 31041

SEQ ID NO: 61515 - DNA, 45 bp, Homo Sapiens; identical to SEQ ID NO: 13604

SEQ ID NO: 61516 - DNA, 37 bp, Homo Sapiens; identical to SEQ ID NO: 7002

SEQ ID NO: 61517 - DNA, 24 bp, Homo Sapiens
ataaggcatcagcctccggagctg

SEQ ID NO: 61518 - DNA, 28 bp, Homo Sapiens
ttgacccgggttcgattcccggccaacg

SEQ ID NO: 61519 - DNA, 21 bp, Homo Sapiens
aatggataaggcattggcctc

SEQ ID NO: 61520 - DNA, 30 bp, Homo Sapiens; identical to SEQ ID NO: 2602

SEQ ID NO: 61521 - DNA, 48 bp, Homo Sapiens; identical to SEQ ID NO: 222

SEQ ID NO: 61522 - DNA, 26 bp, Homo Sapiens
tctggtctccaatggaggcgtgggtt

SEQ ID NO: 61523 - DNA, 29 bp, Homo Sapiens
ttaacacaaagcacccaacttacacttag

SEQ ID NO: 61524 - DNA, 48 bp, Homo Sapiens; identical to SEQ ID NO: 6485

SEQ ID NO: 61525 - DNA, 42 bp, Homo Sapiens; identical to SEQ ID NO: 23911

SEQ ID NO: 61526 - DNA, 40 bp, Homo Sapiens; identical to SEQ ID NO: 24376

SEQ ID NO: 61527 - DNA, 28 bp, Homo Sapiens
taactcatgcccccatgtctaacaacat

SEQ ID NO: 61528 - DNA, 23 bp, Homo Sapiens
tctgaaggtcgtgagttcgagcc

SEQ ID NO: 61529 - DNA, 34 bp, Homo Sapiens; identical to SEQ ID NO: 16531

SEQ ID NO: 61530 - DNA, 37 bp, Homo Sapiens; identical to SEQ ID NO: 5442

SEQ ID NO: 61531 - DNA, 31 bp, Homo Sapiens; identical to SEQ ID NO: 7367

SEQ ID NO: 61532 - DNA, 28 bp, Homo Sapiens
ttggtggtgcagtggtagaattctcgcc

SEQ ID NO: 61533 - DNA, 39 bp, Homo Sapiens; identical to SEQ ID NO: 10384

SEQ ID NO: 61534 - DNA, 28 bp, Homo Sapiens
ttctcgcctgccacgcgggaggcccggg

SEQ ID NO: 61535 - DNA, 26 bp, Homo Sapiens
cgcgggagaccggggttcaattcccc

SEQ ID NO: 61536 - DNA, 34 bp, Homo Sapiens; identical to SEQ ID NO: 4031

SEQ ID NO: 61537 - DNA, 29 bp, Homo Sapiens
aaattttggtgcaactccaaataaaagta

SEQ ID NO: 61538 - DNA, 23 bp, Homo Sapiens
acacgcgaaaggtccccggttcg

SEQ ID NO: 61539 - DNA, 35 bp, Homo Sapiens; identical to SEQ ID NO: 15948

SEQ ID NO: 61540 - DNA, 42 bp, Homo Sapiens; identical to SEQ ID NO: 28833

SEQ ID NO: 61541 - DNA, 38 bp, Homo Sapiens; identical to SEQ ID NO: 25440

SEQ ID NO: 61542 - DNA, 27 bp, Homo Sapiens
ggtcgtgggttcgagccccacgttggg

SEQ ID NO: 61543 - DNA, 19 bp, Homo Sapiens
agcatgggactcttaatct

SEQ ID NO: 61544 - DNA, 38 bp, Homo Sapiens; identical to SEQ ID NO: 29424

SEQ ID NO: 61545 - DNA, 35 bp, Homo Sapiens; identical to SEQ ID NO: 28765

SEQ ID NO: 61546 - DNA, 23 bp, Homo Sapiens
acccaacttacacttaggagatt

SEQ ID NO: 61547 - DNA, 19 bp, Homo Sapiens
ccgcgcaggttcgaaccct

SEQ ID NO: 61548 - DNA, 38 bp, Homo Sapiens; identical to SEQ ID NO: 3133

SEQ ID NO: 61549 - DNA, 22 bp, Homo Sapiens
gggattagctcaaatggtagag

SEQ ID NO: 61550 - DNA, 22 bp, Homo Sapiens
cggtagagcatgagactcttaa

SEQ ID NO: 61551 - DNA, 30 bp, Homo Sapiens; identical to SEQ ID NO: 7163

SEQ ID NO: 61552 - DNA, 23 bp, Homo Sapiens
aatctgacaacagaggcttacga

SEQ ID NO: 61553 - DNA, 44 bp, Homo Sapiens; identical to SEQ ID NO: 28348

SEQ ID NO: 61554 - DNA, 31 bp, Homo Sapiens; identical to SEQ ID NO: 15554

SEQ ID NO: 61555 - DNA, 27 bp, Homo Sapiens
gcatgggactcttaatcccagggtcgt

SEQ ID NO: 61556 - DNA, 38 bp, Homo Sapiens; identical to SEQ ID NO: 21189

SEQ ID NO: 61557 - DNA, 20 bp, Homo Sapiens
catggggttggcttgaaacc

SEQ ID NO: 61558 - DNA, 31 bp, Homo Sapiens; identical to SEQ ID NO: 30164

SEQ ID NO: 61559 - DNA, 17 bp, Homo Sapiens
ctaaatcctatatatct

SEQ ID NO: 61560 - DNA, 40 bp, Homo Sapiens; identical to SEQ ID NO: 19225

SEQ ID NO: 61561 - DNA, 48 bp, Homo Sapiens; identical to SEQ ID NO: 22238

SEQ ID NO: 61562 - DNA, 29 bp, Homo Sapiens
gtgtagctcagtggtagagcatttgactg

SEQ ID NO: 61563 - DNA, 29 bp, Homo Sapiens
taagtgtttgtgggtttaagtcccattgg

SEQ ID NO: 61564 - DNA, 19 bp, Homo Sapiens
ttccgtagtgtagtggtca

SEQ ID NO: 61565 - DNA, 37 bp, Homo Sapiens; identical to SEQ ID NO: 4532

SEQ ID NO: 61566 - DNA, 19 bp, Homo Sapiens
atgcccccatgtctaacaa

SEQ ID NO: 61567 - DNA, 30 bp, Homo Sapiens; identical to SEQ ID NO: 30248

SEQ ID NO: 61568 - DNA, 48 bp, Homo Sapiens; identical to SEQ ID NO: 4219

SEQ ID NO: 61569 - DNA, 27 bp, Homo Sapiens
tagtggtgagtatccccgcctgtcacg

SEQ ID NO: 61570 - DNA, 37 bp, Homo Sapiens; identical to SEQ ID NO: 2339

SEQ ID NO: 61571 - DNA, 30 bp, Homo Sapiens; identical to SEQ ID NO: 29165

SEQ ID NO: 61572 - DNA, 24 bp, Homo Sapiens
tcggtagagcatgagacccttaat

SEQ ID NO: 61573 - DNA, 46 bp, Homo Sapiens; identical to SEQ ID NO: 1288

SEQ ID NO: 61574 - DNA, 33 bp, Homo Sapiens; identical to SEQ ID NO: 29376

SEQ ID NO: 61575 - DNA, 19 bp, Homo Sapiens
tggttaggattcagcgctc

SEQ ID NO: 61576 - DNA, 21 bp, Homo Sapiens
attgtgctctgcacgcgtggg

SEQ ID NO: 61577 - DNA, 32 bp, Homo Sapiens; identical to SEQ ID NO: 21969

SEQ ID NO: 61578 - DNA, 23 bp, Homo Sapiens
atcatgcaagattcccattcttg

SEQ ID NO: 61579 - DNA, 21 bp, Homo Sapiens
tcgaaaccgagcggaaacacc

SEQ ID NO: 61580 - DNA, 33 bp, Homo Sapiens; identical to SEQ ID NO: 21970

SEQ ID NO: 61581 - DNA, 16 bp, Homo Sapiens
cgatccccggcacctc

SEQ ID NO: 61582 - DNA, 37 bp, Homo Sapiens; identical to SEQ ID NO: 26889

SEQ ID NO: 61583 - DNA, 32 bp, Homo Sapiens; identical to SEQ ID NO: 4478

SEQ ID NO: 61584 - DNA, 48 bp, Homo Sapiens; identical to SEQ ID NO: 23932

SEQ ID NO: 61585 - DNA, 42 bp, Homo Sapiens; identical to SEQ ID NO: 13903

SEQ ID NO: 61586 - DNA, 29 bp, Homo Sapiens
gtcggtagagcatcagacttttaatctga

SEQ ID NO: 61587 - DNA, 16 bp, Homo Sapiens
gtatatagtttaaaca

SEQ ID NO: 61588 - DNA, 47 bp, Homo Sapiens; identical to SEQ ID NO: 12122

SEQ ID NO: 61589 - DNA, 34 bp, Homo Sapiens; identical to SEQ ID NO: 9955

SEQ ID NO: 61590 - DNA, 20 bp, Homo Sapiens
aaccaacacctctttacagt

SEQ ID NO: 61591 - DNA, 35 bp, Homo Sapiens; identical to SEQ ID NO: 5634

SEQ ID NO: 61592 - DNA, 31 bp, Homo Sapiens; identical to SEQ ID NO: 20239

SEQ ID NO: 61593 - DNA, 41 bp, Homo Sapiens; identical to SEQ ID NO: 9223

SEQ ID NO: 61594 - DNA, 40 bp, Homo Sapiens; identical to SEQ ID NO: 7572

SEQ ID NO: 61595 - DNA, 33 bp, Homo Sapiens; identical to SEQ ID NO: 16615

SEQ ID NO: 61596 - DNA, 31 bp, Homo Sapiens; identical to SEQ ID NO: 3910

SEQ ID NO: 61597 - DNA, 37 bp, Homo Sapiens; identical to SEQ ID NO: 20207

SEQ ID NO: 61598 - DNA, 18 bp, Homo Sapiens
gataaggcgtctgattcc

SEQ ID NO: 61599 - DNA, 34 bp, Homo Sapiens; identical to SEQ ID NO: 20605

SEQ ID NO: 61600 - DNA, 21 bp, Homo Sapiens
tgtagtcgtggccgagtggtt

SEQ ID NO: 61601 - DNA, 28 bp, Homo Sapiens
tccagggttcaagtccctgttcaggcgc

SEQ ID NO: 61602 - DNA, 23 bp, Homo Sapiens
cccataccccgaaaatgttggtt

SEQ ID NO: 61603 - DNA, 34 bp, Homo Sapiens; identical to SEQ ID NO: 14626

SEQ ID NO: 61604 - DNA, 46 bp, Homo Sapiens; identical to SEQ ID NO: 4662

SEQ ID NO: 61605 - DNA, 29 bp, Homo Sapiens
gctctcaccgccgcggcccgggttcgatt

SEQ ID NO: 61606 - DNA, 21 bp, Homo Sapiens
cagtcggtggagcatgggact

SEQ ID NO: 61607 - DNA, 34 bp, Homo Sapiens; identical to SEQ ID NO: 27286

SEQ ID NO: 61608 - DNA, 27 bp, Homo Sapiens
gctttggggggttcgattccttccttt

SEQ ID NO: 61609 - DNA, 25 bp, Homo Sapiens
atatgtccgcgtgggttcgaacccc

SEQ ID NO: 61610 - DNA, 42 bp, Homo Sapiens; identical to SEQ ID NO: 7007

SEQ ID NO: 61611 - DNA, 45 bp, Homo Sapiens; identical to SEQ ID NO: 17787

SEQ ID NO: 61612 - DNA, 23 bp, Homo Sapiens
gttcgatcccgggcggaaacacc

SEQ ID NO: 61613 - DNA, 34 bp, Homo Sapiens; identical to SEQ ID NO: 5987

SEQ ID NO: 61614 - DNA, 34 bp, Homo Sapiens; identical to SEQ ID NO: 1294

SEQ ID NO: 61615 - DNA, 45 bp, Homo Sapiens; identical to SEQ ID NO: 17471

SEQ ID NO: 61616 - DNA, 32 bp, Homo Sapiens; identical to SEQ ID NO: 12032

SEQ ID NO: 61617 - DNA, 39 bp, Homo Sapiens; identical to SEQ ID NO: 22579

SEQ ID NO: 61618 - DNA, 32 bp, Homo Sapiens; identical to SEQ ID NO: 7497

SEQ ID NO: 61619 - DNA, 35 bp, Homo Sapiens; identical to SEQ ID NO: 15592

SEQ ID NO: 61620 - DNA, 23 bp, Homo Sapiens
ggttcgatccccgtactggccac

SEQ ID NO: 61621 - DNA, 31 bp, Homo Sapiens; identical to SEQ ID NO: 5850

SEQ ID NO: 61622 - DNA, 23 bp, Homo Sapiens
tcctggttttcacccaggcggcc

SEQ ID NO: 61623 - DNA, 48 bp, Homo Sapiens; identical to SEQ ID NO: 29125

SEQ ID NO: 61624 - DNA, 34 bp, Homo Sapiens; identical to SEQ ID NO: 19171

SEQ ID NO: 61625 - DNA, 26 bp, Homo Sapiens
tccctggttcaatcccgggtttcggc

SEQ ID NO: 61626 - DNA, 31 bp, Homo Sapiens; identical to SEQ ID NO: 30657

SEQ ID NO: 61627 - DNA, 18 bp, Homo Sapiens
cggttagcgcgcggtact

SEQ ID NO: 61628 - DNA, 32 bp, Homo Sapiens; identical to SEQ ID NO: 6807

SEQ ID NO: 61629 - DNA, 24 bp, Homo Sapiens
gatggatcgaaaccatcctctgct

SEQ ID NO: 61630 - DNA, 23 bp, Homo Sapiens
cgtagtgtagcggttatcacatt

SEQ ID NO: 61631 - DNA, 39 bp, Homo Sapiens; identical to SEQ ID NO: 22499

SEQ ID NO: 61632 - DNA, 31 bp, Homo Sapiens; identical to SEQ ID NO: 9139

SEQ ID NO: 61633 - DNA, 47 bp, Homo Sapiens; identical to SEQ ID NO: 5468

SEQ ID NO: 61634 - DNA, 35 bp, Homo Sapiens; identical to SEQ ID NO: 21100

SEQ ID NO: 61635 - DNA, 16 bp, Homo Sapiens
cagtgggtagagcatc

SEQ ID NO: 61636 - DNA, 46 bp, Homo Sapiens; identical to SEQ ID NO: 18316

SEQ ID NO: 61637 - DNA, 43 bp, Homo Sapiens; identical to SEQ ID NO: 9545

SEQ ID NO: 61638 - DNA, 38 bp, Homo Sapiens; identical to SEQ ID NO: 9412

SEQ ID NO: 61639 - DNA, 26 bp, Homo Sapiens
cagtcttgtaaaccggagatgaaaac

SEQ ID NO: 61640 - DNA, 40 bp, Homo Sapiens; identical to SEQ ID NO: 15836

SEQ ID NO: 61641 - DNA, 37 bp, Homo Sapiens; identical to SEQ ID NO: 29501

SEQ ID NO: 61642 - DNA, 28 bp, Homo Sapiens
cgcgtgggttcgaatcccatcctcgtcg

SEQ ID NO: 61643 - DNA, 45 bp, Homo Sapiens; identical to SEQ ID NO: 17894

SEQ ID NO: 61644 - DNA, 16 bp, Homo Sapiens
cgattcccggccaatg

SEQ ID NO: 61645 - DNA, 38 bp, Homo Sapiens; identical to SEQ ID NO: 22498

SEQ ID NO: 61646 - DNA, 48 bp, Homo Sapiens; identical to SEQ ID NO: 10739

SEQ ID NO: 61647 - DNA, 23 bp, Homo Sapiens
gcatcagcctccggagctgggga

SEQ ID NO: 61648 - DNA, 34 bp, Homo Sapiens; identical to SEQ ID NO: 29593

SEQ ID NO: 61649 - DNA, 45 bp, Homo Sapiens; identical to SEQ ID NO: 14669

SEQ ID NO: 61650 - DNA, 31 bp, Homo Sapiens; identical to SEQ ID NO: 5282

SEQ ID NO: 61651 - DNA, 32 bp, Homo Sapiens; identical to SEQ ID NO: 6105

SEQ ID NO: 61652 - DNA, 21 bp, Homo Sapiens
gggttcgattcccggccaacg

SEQ ID NO: 61653 - DNA, 40 bp, Homo Sapiens; identical to SEQ ID NO: 27425

SEQ ID NO: 61654 - DNA, 25 bp, Homo Sapiens
aaccgaagatcgcgggttcgaaccc

SEQ ID NO: 61655 - DNA, 42 bp, Homo Sapiens; identical to SEQ ID NO: 13423

SEQ ID NO: 61656 - DNA, 39 bp, Homo Sapiens; identical to SEQ ID NO: 30044

SEQ ID NO: 61657 - DNA, 48 bp, Homo Sapiens; identical to SEQ ID NO: 13764

SEQ ID NO: 61658 - DNA, 34 bp, Homo Sapiens; identical to SEQ ID NO: 5896

SEQ ID NO: 61659 - DNA, 27 bp, Homo Sapiens
tccgcgtgggttcgaaccccactcctg

SEQ ID NO: 61660 - DNA, 33 bp, Homo Sapiens; identical to SEQ ID NO: 29187

SEQ ID NO: 61661 - DNA, 28 bp, Homo Sapiens
agtcggtagagcatgagacccttaatct

SEQ ID NO: 61662 - DNA, 20 bp, Homo Sapiens
aatcgcataaaacttaaaac

SEQ ID NO: 61663 - DNA, 28 bp, Homo Sapiens
gtagcttacctcctcaaagcaatacact

SEQ ID NO: 61664 - DNA, 33 bp, Homo Sapiens; identical to SEQ ID NO: 22951

SEQ ID NO: 61665 - DNA, 29 bp, Homo Sapiens
ctagtggttaggattcggcgctctcaccg

SEQ ID NO: 61666 - DNA, 48 bp, Homo Sapiens; identical to SEQ ID NO: 54722

SEQ ID NO: 61667 - DNA, 46 bp, Homo Sapiens; identical to SEQ ID NO: 1806

SEQ ID NO: 61668 - DNA, 35 bp, Homo Sapiens; identical to SEQ ID NO: 14948

SEQ ID NO: 61669 - DNA, 21 bp, Homo Sapiens
tggaggcgtgggttcgaatcc

SEQ ID NO: 61670 - DNA, 33 bp, Homo Sapiens; identical to SEQ ID NO: 27092

SEQ ID NO: 61671 - DNA, 42 bp, Homo Sapiens; identical to SEQ ID NO: 1549

SEQ ID NO: 61672 - DNA, 30 bp, Homo Sapiens; identical to SEQ ID NO: 20531

SEQ ID NO: 61673 - DNA, 31 bp, Homo Sapiens; identical to SEQ ID NO: 25141

SEQ ID NO: 61674 - DNA, 37 bp, Homo Sapiens; identical to SEQ ID NO: 6260

SEQ ID NO: 61675 - DNA, 34 bp, Homo Sapiens; identical to SEQ ID NO: 18222

SEQ ID NO: 61676 - DNA, 36 bp, Homo Sapiens; identical to SEQ ID NO: 23724

SEQ ID NO: 61677 - DNA, 45 bp, Homo Sapiens; identical to SEQ ID NO: 6255

SEQ ID NO: 61678 - DNA, 34 bp, Homo Sapiens; identical to SEQ ID NO: 8034

SEQ ID NO: 61679 - DNA, 31 bp, Homo Sapiens; identical to SEQ ID NO: 24959

SEQ ID NO: 61680 - DNA, 35 bp, Homo Sapiens; identical to SEQ ID NO: 23723

SEQ ID NO: 61681 - DNA, 43 bp, Homo Sapiens; identical to SEQ ID NO: 17571

SEQ ID NO: 61682 - DNA, 42 bp, Homo Sapiens; identical to SEQ ID NO: 17025

SEQ ID NO: 61683 - DNA, 30 bp, Homo Sapiens; identical to SEQ ID NO: 12003

SEQ ID NO: 61684 - DNA, 34 bp, Homo Sapiens; identical to SEQ ID NO: 10160

SEQ ID NO: 61685 - DNA, 34 bp, Homo Sapiens; identical to SEQ ID NO: 22638

SEQ ID NO: 61686 - DNA, 39 bp, Homo Sapiens; identical to SEQ ID NO: 13965

SEQ ID NO: 61687 - DNA, 48 bp, Homo Sapiens; identical to SEQ ID NO: 15008

SEQ ID NO: 61688 - DNA, 26 bp, Homo Sapiens
tgaaaatgtttagacgggctcacatc

SEQ ID NO: 61689 - DNA, 37 bp, Homo Sapiens; identical to SEQ ID NO: 6708

SEQ ID NO: 61690 - DNA, 36 bp, Homo Sapiens; identical to SEQ ID NO: 15231

SEQ ID NO: 61691 - DNA, 24 bp, Homo Sapiens
tcgaagaagcagcttcaaacctgc

SEQ ID NO: 61692 - DNA, 22 bp, Homo Sapiens
ttcaatccccggcatctccacc

SEQ ID NO: 61693 - DNA, 43 bp, Homo Sapiens; identical to SEQ ID NO: 5554

SEQ ID NO: 61694 - DNA, 48 bp, Homo Sapiens; identical to SEQ ID NO: 23915

SEQ ID NO: 61695 - DNA, 46 bp, Homo Sapiens; identical to SEQ ID NO: 21023

SEQ ID NO: 61696 - DNA, 34 bp, Homo Sapiens; identical to SEQ ID NO: 8959

SEQ ID NO: 61697 - DNA, 46 bp, Homo Sapiens; identical to SEQ ID NO: 26482

SEQ ID NO: 61698 - DNA, 35 bp, Homo Sapiens; identical to SEQ ID NO: 24531

SEQ ID NO: 61699 - DNA, 32 bp, Homo Sapiens; identical to SEQ ID NO: 21550

SEQ ID NO: 61700 - DNA, 27 bp, Homo Sapiens
ttaggattcctggttttcacccaggtg

SEQ ID NO: 61701 - DNA, 48 bp, Homo Sapiens; identical to SEQ ID NO: 14568

SEQ ID NO: 61702 - DNA, 32 bp, Homo Sapiens; identical to SEQ ID NO: 27480

SEQ ID NO: 61703 - DNA, 48 bp, Homo Sapiens; identical to SEQ ID NO: 23640

SEQ ID NO: 61704 - DNA, 34 bp, Homo Sapiens; identical to SEQ ID NO: 102

SEQ ID NO: 61705 - DNA, 23 bp, Homo Sapiens
cttagcttaattaaagtggctga

SEQ ID NO: 61706 - DNA, 36 bp, Homo Sapiens; identical to SEQ ID NO: 872

SEQ ID NO: 61707 - DNA, 24 bp, Homo Sapiens
tagcgcgttcggctgttaaccgaa

SEQ ID NO: 61708 - DNA, 28 bp, Homo Sapiens
attggtggttcaatggtagaattctcgc

SEQ ID NO: 61709 - DNA, 25 bp, Homo Sapiens
cttacctcctcaaagcaatacactg

SEQ ID NO: 61710 - DNA, 48 bp, Homo Sapiens; identical to SEQ ID NO: 3634

SEQ ID NO: 61711 - DNA, 27 bp, Homo Sapiens
tttacagtcagaggttcaattcctctt

SEQ ID NO: 61712 - DNA, 24 bp, Homo Sapiens
tcgtaaaccgaagatcgcgggttc

SEQ ID NO: 61713 - DNA, 38 bp, Homo Sapiens; identical to SEQ ID NO: 6307

SEQ ID NO: 61714 - DNA, 22 bp, Homo Sapiens
gtggtagaattctcgcctccca

SEQ ID NO: 61715 - DNA, 23 bp, Homo Sapiens
gggctcacatcaccccataaaca

SEQ ID NO: 61716 - DNA, 33 bp, Homo Sapiens; identical to SEQ ID NO: 27461

SEQ ID NO: 61717 - DNA, 24 bp, Homo Sapiens
tgctttgcacgtatgaggccccgg

SEQ ID NO: 61718 - DNA, 17 bp, Homo Sapiens
aaccctgctcgctgcgc

SEQ ID NO: 61719 - DNA, 22 bp, Homo Sapiens
ccctcagtaagttgcaatactt

SEQ ID NO: 61720 - DNA, 45 bp, Homo Sapiens; identical to SEQ ID NO: 27700

SEQ ID NO: 61721 - DNA, 23 bp, Homo Sapiens
cgagttcaattctcgctggggcc

SEQ ID NO: 61722 - DNA, 17 bp, Homo Sapiens
cgatggatcgaaaccat

SEQ ID NO: 61723 - DNA, 18 bp, Homo Sapiens
cacgtatgaggccccggg

SEQ ID NO: 61724 - DNA, 48 bp, Homo Sapiens; identical to SEQ ID NO: 30477

SEQ ID NO: 61725 - DNA, 29 bp, Homo Sapiens
ccccatgtctaacaacatggctttctcac

SEQ ID NO: 61726 - DNA, 37 bp, Homo Sapiens; identical to SEQ ID NO: 5912

SEQ ID NO: 61727 - DNA, 35 bp, Homo Sapiens; identical to SEQ ID NO: 16665

SEQ ID NO: 61728 - DNA, 26 bp, Homo Sapiens
agtatagtggtgagtatccccgcctg

SEQ ID NO: 61729 - DNA, 30 bp, Homo Sapiens; identical to SEQ ID NO: 27086

SEQ ID NO: 61730 - DNA, 35 bp, Homo Sapiens; identical to SEQ ID NO: 18945

SEQ ID NO: 61731 - DNA, 17 bp, Homo Sapiens
agttgcaatacttaatt

SEQ ID NO: 61732 - DNA, 26 bp, Homo Sapiens
ttaaattataggctaaatcctatata

SEQ ID NO: 61733 - DNA, 20 bp, Homo Sapiens
caggggttagagcactggtc

SEQ ID NO: 61734 - DNA, 39 bp, Homo Sapiens; identical to SEQ ID NO: 26664

SEQ ID NO: 61735 - DNA, 48 bp, Homo Sapiens; identical to SEQ ID NO: 29587

SEQ ID NO: 61736 - DNA, 39 bp, Homo Sapiens; identical to SEQ ID NO: 3889

SEQ ID NO: 61737 - DNA, 35 bp, Homo Sapiens; identical to SEQ ID NO: 2090

SEQ ID NO: 61738 - DNA, 33 bp, Homo Sapiens; identical to SEQ ID NO: 22883

SEQ ID NO: 61739 - DNA, 23 bp, Homo Sapiens
ggtgattttcatattgaattgca

SEQ ID NO: 61740 - DNA, 20 bp, Homo Sapiens
tagggtgcttagctgttaac

SEQ ID NO: 61741 - DNA, 29 bp, Homo Sapiens
attctcgcctgccacgcgggaggcccggg

SEQ ID NO: 61742 - DNA, 17 bp, Homo Sapiens
gaagcagcttcaaacct

SEQ ID NO: 61743 - DNA, 28 bp, Homo Sapiens
tatagtttaaccaaaacatcagattgtg

SEQ ID NO: 61744 - DNA, 48 bp, Homo Sapiens; identical to SEQ ID NO: 7509

SEQ ID NO: 61745 - DNA, 36 bp, Homo Sapiens; identical to SEQ ID NO: 22703

SEQ ID NO: 61746 - DNA, 32 bp, Homo Sapiens; identical to SEQ ID NO: 15595

SEQ ID NO: 61747 - DNA, 48 bp, Homo Sapiens; identical to SEQ ID NO: 16352

SEQ ID NO: 61748 - DNA, 45 bp, Homo Sapiens; identical to SEQ ID NO: 14698

SEQ ID NO: 61749 - DNA, 34 bp, Homo Sapiens; identical to SEQ ID NO: 4263

SEQ ID NO: 61750 - DNA, 33 bp, Homo Sapiens; identical to SEQ ID NO: 5283

SEQ ID NO: 61751 - DNA, 48 bp, Homo Sapiens; identical to SEQ ID NO: 16967

SEQ ID NO: 61752 - DNA, 45 bp, Homo Sapiens; identical to SEQ ID NO: 16116

SEQ ID NO: 61753 - DNA, 23 bp, Homo Sapiens
taaaagagttactttgatagagt

SEQ ID NO: 61754 - DNA, 42 bp, Homo Sapiens; identical to SEQ ID NO: 9812

SEQ ID NO: 61755 - DNA, 27 bp, Homo Sapiens
atcgggcccataccccgaaaatgttgg

SEQ ID NO: 61756 - DNA, 23 bp, Homo Sapiens
gtgtgataggtggcacggagaat

SEQ ID NO: 61757 - DNA, 17 bp, Homo Sapiens
tctgcgttgtggccgca

SEQ ID NO: 61758 - DNA, 23 bp, Homo Sapiens
tagagccagactgcctgggtttg

SEQ ID NO: 61759 - DNA, 47 bp, Homo Sapiens; identical to SEQ ID NO: 7468

SEQ ID NO: 61760 - DNA, 36 bp, Homo Sapiens; identical to SEQ ID NO: 26460

SEQ ID NO: 61761 - DNA, 42 bp, Homo Sapiens; identical to SEQ ID NO: 11530

SEQ ID NO: 61762 - DNA, 26 bp, Homo Sapiens
agtaagttgcaatacttaatttctgc

SEQ ID NO: 61763 - DNA, 33 bp, Homo Sapiens; identical to SEQ ID NO: 23615

SEQ ID NO: 61764 - DNA, 46 bp, Homo Sapiens; identical to SEQ ID NO: 12481

SEQ ID NO: 61765 - DNA, 19 bp, Homo Sapiens
agcgcgctggacttctaat

SEQ ID NO: 61766 - DNA, 34 bp, Homo Sapiens; identical to SEQ ID NO: 8594

SEQ ID NO: 61767 - DNA, 31 bp, Homo Sapiens; identical to SEQ ID NO: 9056

SEQ ID NO: 61768 - DNA, 48 bp, Homo Sapiens; identical to SEQ ID NO: 545

SEQ ID NO: 61769 - DNA, 20 bp, Homo Sapiens
aagagaaccaacacctcttt

SEQ ID NO: 61770 - DNA, 26 bp, Homo Sapiens
aggtggcccgggttcgactcccggta

SEQ ID NO: 61771 - DNA, 21 bp, Homo Sapiens
tttgatagagtaaataatagg

SEQ ID NO: 61772 - DNA, 24 bp, Homo Sapiens
aagacaggggttaggcctcttttt

SEQ ID NO: 61773 - DNA, 23 bp, Homo Sapiens
caatacactgaaaatgtttagac

SEQ ID NO: 61774 - DNA, 35 bp, Homo Sapiens; identical to SEQ ID NO: 21947

SEQ ID NO: 61775 - DNA, 43 bp, Homo Sapiens; identical to SEQ ID NO: 19665

SEQ ID NO: 61776 - DNA, 37 bp, Homo Sapiens; identical to SEQ ID NO: 18958

SEQ ID NO: 61777 - DNA, 27 bp, Homo Sapiens
tcggaggcgtgggttcgaatcccaccg

SEQ ID NO: 61778 - DNA, 32 bp, Homo Sapiens; identical to SEQ ID NO: 15070

SEQ ID NO: 61779 - DNA, 32 bp, Homo Sapiens; identical to SEQ ID NO: 3260

SEQ ID NO: 61780 - DNA, 31 bp, Homo Sapiens; identical to SEQ ID NO: 971

SEQ ID NO: 61781 - DNA, 25 bp, Homo Sapiens
attcgaagaagcagcttcaaacctg

SEQ ID NO: 61782 - DNA, 19 bp, Homo Sapiens
ttaaacccccttatttcta

SEQ ID NO: 61783 - DNA, 25 bp, Homo Sapiens
tttggtgcaactccaaataaaagta

SEQ ID NO: 61784 - DNA, 30 bp, Homo Sapiens; identical to SEQ ID NO: 25724

SEQ ID NO: 61785 - DNA, 41 bp, Homo Sapiens; identical to SEQ ID NO: 29021

SEQ ID NO: 61786 - DNA, 47 bp, Homo Sapiens; identical to SEQ ID NO: 23813

SEQ ID NO: 61787 - DNA, 43 bp, Homo Sapiens; identical to SEQ ID NO: 26375

SEQ ID NO: 61788 - DNA, 36 bp, Homo Sapiens; identical to SEQ ID NO: 4392

SEQ ID NO: 61789 - DNA, 36 bp, Homo Sapiens; identical to SEQ ID NO: 6232

SEQ ID NO: 61790 - DNA, 42 bp, Homo Sapiens; identical to SEQ ID NO: 14887

SEQ ID NO: 61791 - DNA, 48 bp, Homo Sapiens; identical to SEQ ID NO: 15503

SEQ ID NO: 61792 - DNA, 42 bp, Homo Sapiens; identical to SEQ ID NO: 8203

SEQ ID NO: 61793 - DNA, 31 bp, Homo Sapiens; identical to SEQ ID NO: 18130

SEQ ID NO: 61794 - DNA, 25 bp, Homo Sapiens
ctagttttgacaacattcaaaaaag

SEQ ID NO: 61795 - DNA, 37 bp, Homo Sapiens; identical to SEQ ID NO: 14666

SEQ ID NO: 61796 - DNA, 34 bp, Homo Sapiens; identical to SEQ ID NO: 28697

SEQ ID NO: 61797 - DNA, 40 bp, Homo Sapiens; identical to SEQ ID NO: 30469

SEQ ID NO: 61798 - DNA, 48 bp, Homo Sapiens; identical to SEQ ID NO: 22200

SEQ ID NO: 61799 - DNA, 45 bp, Homo Sapiens; identical to SEQ ID NO: 18494

SEQ ID NO: 61800 - DNA, 25 bp, Homo Sapiens
tggtggagttaaagactttttctct

SEQ ID NO: 61801 - DNA, 40 bp, Homo Sapiens; identical to SEQ ID NO: 3008

SEQ ID NO: 61802 - DNA, 32 bp, Homo Sapiens; identical to SEQ ID NO: 17841

SEQ ID NO: 61803 - DNA, 17 bp, Homo Sapiens
taacttagcattaacct

SEQ ID NO: 61804 - DNA, 28 bp, Homo Sapiens
aaaattttggtgcaactccaaataaaag

SEQ ID NO: 61805 - DNA, 30 bp, Homo Sapiens; identical to SEQ ID NO: 29223

SEQ ID NO: 61806 - DNA, 31 bp, Homo Sapiens; identical to SEQ ID NO: 22870

SEQ ID NO: 61807 - DNA, 19 bp, Homo Sapiens
gtcggtagagcataagact

SEQ ID NO: 61808 - DNA, 22 bp, Homo Sapiens
ttaaatacagaccaagagcctt

SEQ ID NO: 61809 - DNA, 36 bp, Homo Sapiens; identical to SEQ ID NO: 11445

SEQ ID NO: 61810 - DNA, 35 bp, Homo Sapiens; identical to SEQ ID NO: 14192

SEQ ID NO: 61811 - DNA, 37 bp, Homo Sapiens; identical to SEQ ID NO: 18089

SEQ ID NO: 61812 - DNA, 24 bp, Homo Sapiens
ttttgacaacattcaaaaaagagt

SEQ ID NO: 61813 - DNA, 20 bp, Homo Sapiens
ctccggatggaggcgtgggt

SEQ ID NO: 61814 - DNA, 40 bp, Homo Sapiens; identical to SEQ ID NO: 29529

SEQ ID NO: 61815 - DNA, 22 bp, Homo Sapiens
ttaaaactttacagtcagaggt

SEQ ID NO: 61816 - DNA, 48 bp, Homo Sapiens; identical to SEQ ID NO: 19948

SEQ ID NO: 61817 - DNA, 18 bp, Homo Sapiens
taaacccccttatttcta

SEQ ID NO: 61818 - DNA, 23 bp, Homo Sapiens
ttgacaacattcaaaaaagagta

SEQ ID NO: 61819 - DNA, 46 bp, Homo Sapiens; identical to SEQ ID NO: 13307

SEQ ID NO: 61820 - DNA, 41 bp, Homo Sapiens; identical to SEQ ID NO: 9728

SEQ ID NO: 61821 - DNA, 28 bp, Homo Sapiens
taaaggataacagctatccattggtctt

SEQ ID NO: 61822 - DNA, 32 bp, Homo Sapiens; identical to SEQ ID NO: 9100

SEQ ID NO: 61823 - DNA, 41 bp, Homo Sapiens; identical to SEQ ID NO: 5988

SEQ ID NO: 61824 - DNA, 45 bp, Homo Sapiens; identical to SEQ ID NO: 7577

SEQ ID NO: 61825 - DNA, 34 bp, Homo Sapiens; identical to SEQ ID NO: 25596

SEQ ID NO: 61826 - DNA, 42 bp, Homo Sapiens; identical to SEQ ID NO: 7574

SEQ ID NO: 61827 - DNA, 18 bp, Homo Sapiens
gggttcgattcccggtca

SEQ ID NO: 61828 - DNA, 19 bp, Homo Sapiens
aacaggagatcctgggttc

SEQ ID NO: 61829 - DNA, 39 bp, Homo Sapiens; identical to SEQ ID NO: 26817

SEQ ID NO: 61830 - DNA, 16 bp, Homo Sapiens
aaatctcgctggggcc

SEQ ID NO: 61831 - DNA, 27 bp, Homo Sapiens
gtgggttcgaatcccaccctcgtcgcc

SEQ ID NO: 61832 - DNA, 33 bp, Homo Sapiens; identical to SEQ ID NO: 17370

SEQ ID NO: 61833 - DNA, 22 bp, Homo Sapiens
ccaggcggcccgggttcgactc

SEQ ID NO: 61834 - DNA, 40 bp, Homo Sapiens; identical to SEQ ID NO: 1013

SEQ ID NO: 61835 - DNA, 34 bp, Homo Sapiens; identical to SEQ ID NO: 8814

SEQ ID NO: 61836 - DNA, 36 bp, Homo Sapiens; identical to SEQ ID NO: 9965

SEQ ID NO: 61837 - DNA, 18 bp, Homo Sapiens
cgagtctcggtggaacct

SEQ ID NO: 61838 - DNA, 36 bp, Homo Sapiens; identical to SEQ ID NO: 29494

SEQ ID NO: 61839 - DNA, 39 bp, Homo Sapiens; identical to SEQ ID NO: 30976

SEQ ID NO: 61840 - DNA, 28 bp, Homo Sapiens
agggtcgtgggttcgagccccacgttgg

SEQ ID NO: 61841 - DNA, 48 bp, Homo Sapiens; identical to SEQ ID NO: 7748

SEQ ID NO: 61842 - DNA, 39 bp, Homo Sapiens; identical to SEQ ID NO: 29309

SEQ ID NO: 61843 - DNA, 37 bp, Homo Sapiens; identical to SEQ ID NO: 6062

SEQ ID NO: 61844 - DNA, 44 bp, Homo Sapiens; identical to SEQ ID NO: 4242

SEQ ID NO: 61845 - DNA, 23 bp, Homo Sapiens
gattttcatattgaattgcaaat

SEQ ID NO: 61846 - DNA, 48 bp, Homo Sapiens; identical to SEQ ID NO: 30128

SEQ ID NO: 61847 - DNA, 24 bp, Homo Sapiens
agaggcttacgaccccttatttac

SEQ ID NO: 61848 - DNA, 16 bp, Homo Sapiens
caagttctggtctcca

SEQ ID NO: 61849 - DNA, 44 bp, Homo Sapiens; identical to SEQ ID NO: 733

SEQ ID NO: 61850 - DNA, 31 bp, Homo Sapiens; identical to SEQ ID NO: 672

SEQ ID NO: 61851 - DNA, 28 bp, Homo Sapiens
tccgggttcgagtcccggcagagatgcc

SEQ ID NO: 61852 - DNA, 48 bp, Homo Sapiens; identical to SEQ ID NO: 16576

SEQ ID NO: 61853 - DNA, 31 bp, Homo Sapiens; identical to SEQ ID NO: 9565

SEQ ID NO: 61854 - DNA, 17 bp, Homo Sapiens
ccagtggcctaatggat

SEQ ID NO: 61855 - DNA, 22 bp, Homo Sapiens
taatcgcataaaacttaaaact

SEQ ID NO: 61856 - DNA, 37 bp, Homo Sapiens; identical to SEQ ID NO: 31138

SEQ ID NO: 61857 - DNA, 29 bp, Homo Sapiens
acgaggccccgggttcaatccccggcacc

SEQ ID NO: 61858 - DNA, 21 bp, Homo Sapiens
aaaatgttggttatacccttc

SEQ ID NO: 61859 - DNA, 30 bp, Homo Sapiens; identical to SEQ ID NO: 24588

SEQ ID NO: 61860 - DNA, 38 bp, Homo Sapiens; identical to SEQ ID NO: 13731

SEQ ID NO: 61861 - DNA, 35 bp, Homo Sapiens; identical to SEQ ID NO: 28281

SEQ ID NO: 61862 - DNA, 32 bp, Homo Sapiens; identical to SEQ ID NO: 12369

SEQ ID NO: 61863 - DNA, 23 bp, Homo Sapiens
aggttgtgagttcgagcctcacc

SEQ ID NO: 61864 - DNA, 37 bp, Homo Sapiens; identical to SEQ ID NO: 25987

SEQ ID NO: 61865 - DNA, 26 bp, Homo Sapiens
ttttgacaacattcaaaaaagagtac

SEQ ID NO: 61866 - DNA, 31 bp, Homo Sapiens; identical to SEQ ID NO: 5252

SEQ ID NO: 61867 - DNA, 24 bp, Homo Sapiens
ttggtgcaactccaaataaaagta

SEQ ID NO: 61868 - DNA, 32 bp, Homo Sapiens; identical to SEQ ID NO: 26762

SEQ ID NO: 61869 - DNA, 45 bp, Homo Sapiens; identical to SEQ ID NO: 23511

SEQ ID NO: 61870 - DNA, 27 bp, Homo Sapiens
gtgtagctcagtggtagagcgcgtgct

SEQ ID NO: 61871 - DNA, 16 bp, Homo Sapiens
ctccggatggaggcgt

SEQ ID NO: 61872 - DNA, 46 bp, Homo Sapiens; identical to SEQ ID NO: 543

SEQ ID NO: 61873 - DNA, 26 bp, Homo Sapiens
gatagctcagctggtagagcggagga

SEQ ID NO: 61874 - DNA, 29 bp, Homo Sapiens
gcactgtaaagctaacttagcattaacct

SEQ ID NO: 61875 - DNA, 31 bp, Homo Sapiens; identical to SEQ ID NO: 31182

SEQ ID NO: 61876 - DNA, 29 bp, Homo Sapiens
ttttggtgcaactccaaataaaagtacca

SEQ ID NO: 61877 - DNA, 28 bp, Homo Sapiens
ttttggtgcaactccaaataaaagtacc

SEQ ID NO: 61878 - DNA, 28 bp, Homo Sapiens
ttttgacaacattcaaaaaagagtacca

SEQ ID NO: 61879 - DNA, 17 bp, Homo Sapiens
ttttcatattgaattgc

SEQ ID NO: 61880 - DNA, 32 bp, Homo Sapiens; identical to SEQ ID NO: 31106

SEQ ID NO: 61881 - DNA, 27 bp, Homo Sapiens
ttttagtataaatagtaccgttaactt

SEQ ID NO: 61882 - DNA, 25 bp, Homo Sapiens
ttttagtataaatagtaccgttaac

SEQ ID NO: 61883 - DNA, 40 bp, Homo Sapiens; identical to SEQ ID NO: 31088

SEQ ID NO: 61884 - DNA, 28 bp, Homo Sapiens
ttttaaaggataacagctatccattggt

SEQ ID NO: 61885 - DNA, 17 bp, Homo Sapiens
ttttaaaggataacagc

SEQ ID NO: 61886 - DNA, 36 bp, Homo Sapiens; identical to SEQ ID NO: 31038

SEQ ID NO: 61887 - DNA, 27 bp, Homo Sapiens
tttggtgcaactccaaataaaagtacc

SEQ ID NO: 61888 - DNA, 19 bp, Homo Sapiens
tttggggggttcgattcct

SEQ ID NO: 61889 - DNA, 18 bp, Homo Sapiens
tttggggggttcgattcc

SEQ ID NO: 61890 - DNA, 42 bp, Homo Sapiens; identical to SEQ ID NO: 30984

SEQ ID NO: 61891 - DNA, 38 bp, Homo Sapiens; identical to SEQ ID NO: 30981

SEQ ID NO: 61892 - DNA, 35 bp, Homo Sapiens; identical to SEQ ID NO: 30967

SEQ ID NO: 61893 - DNA, 26 bp, Homo Sapiens
tttgatagagtaaataataggagctt

SEQ ID NO: 61894 - DNA, 19 bp, Homo Sapiens
tttcgactcattaaattat

SEQ ID NO: 61895 - DNA, 26 bp, Homo Sapiens
tttcatattgaattgcaaattcgaag

SEQ ID NO: 61896 - DNA, 18 bp, Homo Sapiens
tttaggttaaatacagac

SEQ ID NO: 61897 - DNA, 17 bp, Homo Sapiens
tttaagttaaagattaa

SEQ ID NO: 61898 - DNA, 36 bp, Homo Sapiens; identical to SEQ ID NO: 30675

SEQ ID NO: 61899 - DNA, 31 bp, Homo Sapiens; identical to SEQ ID NO: 30648

SEQ ID NO: 61900 - DNA, 30 bp, Homo Sapiens; identical to SEQ ID NO: 30647

SEQ ID NO: 61901 - DNA, 25 bp, Homo Sapiens
tttaaacaaaacgaatgatttcgac

SEQ ID NO: 61902 - DNA, 42 bp, Homo Sapiens; identical to SEQ ID NO: 30607

SEQ ID NO: 61903 - DNA, 34 bp, Homo Sapiens; identical to SEQ ID NO: 30584

SEQ ID NO: 61904 - DNA, 43 bp, Homo Sapiens; identical to SEQ ID NO: 30552

SEQ ID NO: 61905 - DNA, 26 bp, Homo Sapiens
ttggtggttcgatcccacccagggac

SEQ ID NO: 61906 - DNA, 48 bp, Homo Sapiens; identical to SEQ ID NO: 30477

SEQ ID NO: 61907 - DNA, 43 bp, Homo Sapiens; identical to SEQ ID NO: 30472

SEQ ID NO: 61908 - DNA, 39 bp, Homo Sapiens; identical to SEQ ID NO: 30468

SEQ ID NO: 61909 - DNA, 35 bp, Homo Sapiens; identical to SEQ ID NO: 30464

SEQ ID NO: 61910 - DNA, 29 bp, Homo Sapiens
ttggtggttcaatggtagaattctcgcct

SEQ ID NO: 61911 - DNA, 29 bp, Homo Sapiens
ttggtggtgcagtggtagaattctcgcct

SEQ ID NO: 61912 - DNA, 32 bp, Homo Sapiens; identical to SEQ ID NO: 30424

SEQ ID NO: 61913 - DNA, 20 bp, Homo Sapiens
ttggtgcaactccaaataaa

SEQ ID NO: 61914 - DNA, 23 bp, Homo Sapiens
ttggtctagtggtatgattctcg

SEQ ID NO: 61915 - DNA, 38 bp, Homo Sapiens; identical to SEQ ID NO: 30362

SEQ ID NO: 61916 - DNA, 39 bp, Homo Sapiens; identical to SEQ ID NO: 30353

SEQ ID NO: 61917 - DNA, 24 bp, Homo Sapiens
ttggggtttccccgcgcaggttcg

SEQ ID NO: 61918 - DNA, 28 bp, Homo Sapiens
ttggcctcctaagccagggattgtgggt

SEQ ID NO: 61919 - DNA, 43 bp, Homo Sapiens; identical to SEQ ID NO: 30301

SEQ ID NO: 61920 - DNA, 38 bp, Homo Sapiens; identical to SEQ ID NO: 30291

SEQ ID NO: 61921 - DNA, 19 bp, Homo Sapiens
ttgcaatacttaatttctg

SEQ ID NO: 61922 - DNA, 42 bp, Homo Sapiens; identical to SEQ ID NO: 30238

SEQ ID NO: 61923 - DNA, 42 bp, Homo Sapiens; identical to SEQ ID NO: 30227

SEQ ID NO: 61924 - DNA, 33 bp, Homo Sapiens; identical to SEQ ID NO: 30192

SEQ ID NO: 61925 - DNA, 32 bp, Homo Sapiens; identical to SEQ ID NO: 30191

SEQ ID NO: 61926 - DNA, 27 bp, Homo Sapiens
ttgagggttcgaatcccttcgtggttg

SEQ ID NO: 61927 - DNA, 48 bp, Homo Sapiens; identical to SEQ ID NO: 30128

SEQ ID NO: 61928 - DNA, 16 bp, Homo Sapiens
ttctgtagtgtagtgg

SEQ ID NO: 61929 - DNA, 36 bp, Homo Sapiens; identical to SEQ ID NO: 30077

SEQ ID NO: 61930 - DNA, 48 bp, Homo Sapiens; identical to SEQ ID NO: 30047

SEQ ID NO: 61931 - DNA, 16 bp, Homo Sapiens
ttcggcgctctcaccg

SEQ ID NO: 61932 - DNA, 24 bp, Homo Sapiens
ttcggatcagaagattgcaggttc

SEQ ID NO: 61933 - DNA, 23 bp, Homo Sapiens
ttcgactcattaaattatgataa

SEQ ID NO: 61934 - DNA, 17 bp, Homo Sapiens
ttcgaatcccagcgggg

SEQ ID NO: 61935 - DNA, 17 bp, Homo Sapiens
ttcgaatcccactcctg

SEQ ID NO: 61936 - DNA, 34 bp, Homo Sapiens; identical to SEQ ID NO: 29843

SEQ ID NO: 61937 - DNA, 40 bp, Homo Sapiens; identical to SEQ ID NO: 29730

SEQ ID NO: 61938 - DNA, 17 bp, Homo Sapiens
ttcccggccagggaacc

SEQ ID NO: 61939 - DNA, 21 bp, Homo Sapiens
ttccccgcgcaggttcgaatc

SEQ ID NO: 61940 - DNA, 37 bp, Homo Sapiens; identical to SEQ ID NO: 29664

SEQ ID NO: 61941 - DNA, 48 bp, Homo Sapiens; identical to SEQ ID NO: 29587

SEQ ID NO: 61942 - DNA, 34 bp, Homo Sapiens; identical to SEQ ID NO: 29549

SEQ ID NO: 61943 - DNA, 33 bp, Homo Sapiens; identical to SEQ ID NO: 29526

SEQ ID NO: 61944 - DNA, 16 bp, Homo Sapiens
ttcaaacctgccgggg

SEQ ID NO: 61945 - DNA, 25 bp, Homo Sapiens
ttatgtagcttacctcctcaaagca

SEQ ID NO: 61946 - DNA, 33 bp, Homo Sapiens; identical to SEQ ID NO: 29393

SEQ ID NO: 61947 - DNA, 33 bp, Homo Sapiens; identical to SEQ ID NO: 29376

SEQ ID NO: 61948 - DNA, 29 bp, Homo Sapiens
ttagtatagtggtgagtatccccgcctgt

SEQ ID NO: 61949 - DNA, 34 bp, Homo Sapiens; identical to SEQ ID NO: 29346

SEQ ID NO: 61950 - DNA, 33 bp, Homo Sapiens; identical to SEQ ID NO: 29345

SEQ ID NO: 61951 - DNA, 48 bp, Homo Sapiens; identical to SEQ ID NO: 29337

SEQ ID NO: 61952 - DNA, 48 bp, Homo Sapiens; identical to SEQ ID NO: 29305

SEQ ID NO: 61953 - DNA, 41 bp, Homo Sapiens; identical to SEQ ID NO: 29274

SEQ ID NO: 61954 - DNA, 32 bp, Homo Sapiens; identical to SEQ ID NO: 29262

SEQ ID NO: 61955 - DNA, 31 bp, Homo Sapiens; identical to SEQ ID NO: 29261

SEQ ID NO: 61956 - DNA, 23 bp, Homo Sapiens
ttaggagatttcaacttaacttg

SEQ ID NO: 61957 - DNA, 16 bp, Homo Sapiens
ttaggagatttcaact

SEQ ID NO: 61958 - DNA, 31 bp, Homo Sapiens; identical to SEQ ID NO: 29237

SEQ ID NO: 61959 - DNA, 26 bp, Homo Sapiens
ttagctttgggtgctaatggtggagt

SEQ ID NO: 61960 - DNA, 48 bp, Homo Sapiens; identical to SEQ ID NO: 29231

SEQ ID NO: 61961 - DNA, 25 bp, Homo Sapiens
ttagctgttaactaagtgtttgtgg

SEQ ID NO: 61962 - DNA, 16 bp, Homo Sapiens
ttagcgcagtaggtag

SEQ ID NO: 61963 - DNA, 33 bp, Homo Sapiens; identical to SEQ ID NO: 29187

SEQ ID NO: 61964 - DNA, 48 bp, Homo Sapiens; identical to SEQ ID NO: 29125

SEQ ID NO: 61965 - DNA, 36 bp, Homo Sapiens; identical to SEQ ID NO: 29059

SEQ ID NO: 61966 - DNA, 25 bp, Homo Sapiens
ttacacttaggagatttcaacttaa

SEQ ID NO: 61967 - DNA, 39 bp, Homo Sapiens; identical to SEQ ID NO: 29037

SEQ ID NO: 61968 - DNA, 16 bp, Homo Sapiens
ttaatctcagggtcgt

SEQ ID NO: 61969 - DNA, 19 bp, Homo Sapiens
ttaagttaaagattaagag

SEQ ID NO: 61970 - DNA, 28 bp, Homo Sapiens
ttaacttccaattaactagttttgacaa

SEQ ID NO: 61971 - DNA, 34 bp, Homo Sapiens; identical to SEQ ID NO: 28918

SEQ ID NO: 61972 - DNA, 32 bp, Homo Sapiens; identical to SEQ ID NO: 28885

SEQ ID NO: 61973 - DNA, 35 bp, Homo Sapiens; identical to SEQ ID NO: 28871

SEQ ID NO: 61974 - DNA, 48 bp, Homo Sapiens; identical to SEQ ID NO: 28863

SEQ ID NO: 61975 - DNA, 45 bp, Homo Sapiens; identical to SEQ ID NO: 28860

SEQ ID NO: 61976 - DNA, 36 bp, Homo Sapiens; identical to SEQ ID NO: 28853

SEQ ID NO: 61977 - DNA, 28 bp, Homo Sapiens
ttaaccaaaacatcagattgtgaatctg

SEQ ID NO: 61978 - DNA, 29 bp, Homo Sapiens
ttaacacaaagcacccaacttacacttag

SEQ ID NO: 61979 - DNA, 17 bp, Homo Sapiens
ttaaattatgataatca

SEQ ID NO: 61980 - DNA, 34 bp, Homo Sapiens; identical to SEQ ID NO: 28804

SEQ ID NO: 61981 - DNA, 36 bp, Homo Sapiens; identical to SEQ ID NO: 28783

SEQ ID NO: 61982 - DNA, 18 bp, Homo Sapiens
ttaaacccccttatttct

SEQ ID NO: 61983 - DNA, 25 bp, Homo Sapiens
ttaaaactttacagtcagaggttca

SEQ ID NO: 61984 - DNA, 34 bp, Homo Sapiens; identical to SEQ ID NO: 28647

SEQ ID NO: 61985 - DNA, 17 bp, Homo Sapiens
tgtggtctagtggttag

SEQ ID NO: 61986 - DNA, 26 bp, Homo Sapiens
tgtgggttcgagtcccacctggggtg

SEQ ID NO: 61987 - DNA, 23 bp, Homo Sapiens
tgtctcgtaaacaggagatcctg

SEQ ID NO: 61988 - DNA, 18 bp, Homo Sapiens
tgtctaacaacatggctt

SEQ ID NO: 61989 - DNA, 21 bp, Homo Sapiens
tgtccgcgtgggttcgaaccc

SEQ ID NO: 61990 - DNA, 33 bp, Homo Sapiens; identical to SEQ ID NO: 28539

SEQ ID NO: 61991 - DNA, 23 bp, Homo Sapiens
tgtagtggttatcatgttcgcct

SEQ ID NO: 61992 - DNA, 20 bp, Homo Sapiens
tgtagtggtcatcacgttcg

SEQ ID NO: 61993 - DNA, 40 bp, Homo Sapiens; identical to SEQ ID NO: 28499

SEQ ID NO: 61994 - DNA, 21 bp, Homo Sapiens
tgtagtcgtggccgagtggtt

SEQ ID NO: 61995 - DNA, 43 bp, Homo Sapiens; identical to SEQ ID NO: 28443

SEQ ID NO: 61996 - DNA, 27 bp, Homo Sapiens
tgtaaaccggagatgaaaacctttttc

SEQ ID NO: 61997 - DNA, 48 bp, Homo Sapiens; identical to SEQ ID NO: 28392

SEQ ID NO: 61998 - DNA, 16 bp, Homo Sapiens
tggttcgagcccaccc

SEQ ID NO: 61999 - DNA, 25 bp, Homo Sapiens
tggttcgaatccggctcggaggacc

SEQ ID NO: 62000 - DNA, 48 bp, Homo Sapiens; identical to SEQ ID NO: 28350

SEQ ID NO: 62001 - DNA, 44 bp, Homo Sapiens; identical to SEQ ID NO: 28348

SEQ ID NO: 62002 - DNA, 18 bp, Homo Sapiens
tggttatcacgtctgctt

SEQ ID NO: 62003 - DNA, 17 bp, Homo Sapiens
tggttaggattcagcgc

SEQ ID NO: 62004 - DNA, 34 bp, Homo Sapiens; identical to SEQ ID NO: 28240

SEQ ID NO: 62005 - DNA, 41 bp, Homo Sapiens; identical to SEQ ID NO: 28215

SEQ ID NO: 62006 - DNA, 25 bp, Homo Sapiens
tggtggagttaaagactttttctct

SEQ ID NO: 62007 - DNA, 20 bp, Homo Sapiens
tggtgcaactccaaataaaa

SEQ ID NO: 62008 - DNA, 28 bp, Homo Sapiens
tggtgagcactctggactctgaatccag

SEQ ID NO: 62009 - DNA, 44 bp, Homo Sapiens; identical to SEQ ID NO: 28044

SEQ ID NO: 62010 - DNA, 34 bp, Homo Sapiens; identical to SEQ ID NO: 28007

SEQ ID NO: 62011 - DNA, 40 bp, Homo Sapiens; identical to SEQ ID NO: 27866

SEQ ID NO: 62012 - DNA, 33 bp, Homo Sapiens; identical to SEQ ID NO: 27833

SEQ ID NO: 62013 - DNA, 32 bp, Homo Sapiens; identical to SEQ ID NO: 27740

SEQ ID NO: 62014 - DNA, 29 bp, Homo Sapiens
tggaggcgtgggttcgaatcccacttctg

SEQ ID NO: 62015 - DNA, 21 bp, Homo Sapiens
tggaggcgtgggttcgaatcc

SEQ ID NO: 62016 - DNA, 34 bp, Homo Sapiens; identical to SEQ ID NO: 27658

SEQ ID NO: 62017 - DNA, 28 bp, Homo Sapiens
tgctaatggtggagttaaagactttttc

SEQ ID NO: 62018 - DNA, 38 bp, Homo Sapiens; identical to SEQ ID NO: 27623

SEQ ID NO: 62019 - DNA, 17 bp, Homo Sapiens
tgatttcgactcattaa

SEQ ID NO: 62020 - DNA, 25 bp, Homo Sapiens
tgattagggtgcttagctgttaact

SEQ ID NO: 62021 - DNA, 20 bp, Homo Sapiens
tgattagggtgcttagctgt

SEQ ID NO: 62022 - DNA, 23 bp, Homo Sapiens
tgatagagtaaataataggagct

SEQ ID NO: 62023 - DNA, 16 bp, Homo Sapiens
tgatagagtaaataat

SEQ ID NO: 62024 - DNA, 33 bp, Homo Sapiens; identical to SEQ ID NO: 27285

SEQ ID NO: 62025 - DNA, 34 bp, Homo Sapiens; identical to SEQ ID NO: 27243

SEQ ID NO: 62026 - DNA, 46 bp, Homo Sapiens; identical to SEQ ID NO: 27179

SEQ ID NO: 62027 - DNA, 42 bp, Homo Sapiens; identical to SEQ ID NO: 27175

SEQ ID NO: 62028 - DNA, 26 bp, Homo Sapiens
tgaattgcaaattcgaagaagcagct

SEQ ID NO: 62029 - DNA, 33 bp, Homo Sapiens; identical to SEQ ID NO: 27144

SEQ ID NO: 62030 - DNA, 27 bp, Homo Sapiens
tgaatccagcgatccgagttcgagtct

SEQ ID NO: 62031 - DNA, 33 bp, Homo Sapiens; identical to SEQ ID NO: 27100

SEQ ID NO: 62032 - DNA, 21 bp, Homo Sapiens
tgaaggtcctgagttcgaacc

SEQ ID NO: 62033 - DNA, 35 bp, Homo Sapiens; identical to SEQ ID NO: 27074

SEQ ID NO: 62034 - DNA, 32 bp, Homo Sapiens; identical to SEQ ID NO: 27073

SEQ ID NO: 62035 - DNA, 28 bp, Homo Sapiens
tgaaaatgtttagacgggctcacatcac

SEQ ID NO: 62036 - DNA, 26 bp, Homo Sapiens
tgaaaatgtttagacgggctcacatc

SEQ ID NO: 62037 - DNA, 38 bp, Homo Sapiens; identical to SEQ ID NO: 26974

SEQ ID NO: 62038 - DNA, 35 bp, Homo Sapiens; identical to SEQ ID NO: 26971

SEQ ID NO: 62039 - DNA, 29 bp, Homo Sapiens
tcttaatctcagggtcgtgggttcgagcc

SEQ ID NO: 62040 - DNA, 24 bp, Homo Sapiens
tcttaatctcagggtcgtgggttc

SEQ ID NO: 62041 - DNA, 32 bp, Homo Sapiens; identical to SEQ ID NO: 26849

SEQ ID NO: 62042 - DNA, 40 bp, Homo Sapiens; identical to SEQ ID NO: 26823

SEQ ID NO: 62043 - DNA, 29 bp, Homo Sapiens
tctgaaggtcgtgagttcgagcctcacac

SEQ ID NO: 62044 - DNA, 28 bp, Homo Sapiens
tctgaaggtcgtgagttcgagcctcaca

SEQ ID NO: 62045 - DNA, 23 bp, Homo Sapiens
tctgaaggtcgtgagttcgagcc

SEQ ID NO: 62046 - DNA, 40 bp, Homo Sapiens; identical to SEQ ID NO: 26752

SEQ ID NO: 62047 - DNA, 21 bp, Homo Sapiens
tctcttcgggggcgtgggttc

SEQ ID NO: 62048 - DNA, 21 bp, Homo Sapiens
tctcataatctgaaggtcgtg

SEQ ID NO: 62049 - DNA, 35 bp, Homo Sapiens; identical to SEQ ID NO: 26678

SEQ ID NO: 62050 - DNA, 19 bp, Homo Sapiens
tctcagggatgggttcgat

SEQ ID NO: 62051 - DNA, 31 bp, Homo Sapiens; identical to SEQ ID NO: 26658

SEQ ID NO: 62052 - DNA, 31 bp, Homo Sapiens; identical to SEQ ID NO: 26642

SEQ ID NO: 62053 - DNA, 32 bp, Homo Sapiens; identical to SEQ ID NO: 26624

SEQ ID NO: 62054 - DNA, 30 bp, Homo Sapiens; identical to SEQ ID NO: 26623

SEQ ID NO: 62055 - DNA, 16 bp, Homo Sapiens
tctaggttcgactcct

SEQ ID NO: 62056 - DNA, 29 bp, Homo Sapiens
tctagcggttaggattcctggttttcacc

SEQ ID NO: 62057 - DNA, 29 bp, Homo Sapiens
tctaaagacaggggttaggcctcttttta

SEQ ID NO: 62058 - DNA, 19 bp, Homo Sapiens
tcgtaaaccgaagatcgcg

SEQ ID NO: 62059 - DNA, 23 bp, Homo Sapiens
tcggtagagcatgggactcttaa

SEQ ID NO: 62060 - DNA, 37 bp, Homo Sapiens; identical to SEQ ID NO: 26409

SEQ ID NO: 62061 - DNA, 34 bp, Homo Sapiens; identical to SEQ ID NO: 26407

SEQ ID NO: 62062 - DNA, 26 bp, Homo Sapiens
tcggtagagcatgagacccttaatct

SEQ ID NO: 62063 - DNA, 24 bp, Homo Sapiens
tcggtagagcatgagacccttaat

SEQ ID NO: 62064 - DNA, 20 bp, Homo Sapiens
tcggtagagcatgagaccct

SEQ ID NO: 62065 - DNA, 18 bp, Homo Sapiens
tcggtagagcatgagacc

SEQ ID NO: 62066 - DNA, 26 bp, Homo Sapiens
tcgggggcgtgggttcgaatcccacc

SEQ ID NO: 62067 - DNA, 47 bp, Homo Sapiens; identical to SEQ ID NO: 26361

SEQ ID NO: 62068 - DNA, 33 bp, Homo Sapiens; identical to SEQ ID NO: 26359

SEQ ID NO: 62069 - DNA, 20 bp, Homo Sapiens
tcgggcccataccccgaaaa

SEQ ID NO: 62070 - DNA, 17 bp, Homo Sapiens
tcggctgttaaccgaaa

SEQ ID NO: 62071 - DNA, 31 bp, Homo Sapiens; identical to SEQ ID NO: 26321

SEQ ID NO: 62072 - DNA, 26 bp, Homo Sapiens
tcgatggcgtgggttcgaatcccacc

SEQ ID NO: 62073 - DNA, 38 bp, Homo Sapiens; identical to SEQ ID NO: 26121

SEQ ID NO: 62074 - DNA, 16 bp, Homo Sapiens
tcgaacctcagagggg

SEQ ID NO: 62075 - DNA, 42 bp, Homo Sapiens; identical to SEQ ID NO: 25918

SEQ ID NO: 62076 - DNA, 40 bp, Homo Sapiens; identical to SEQ ID NO: 25916

SEQ ID NO: 62077 - DNA, 17 bp, Homo Sapiens
tcctcacacggggcacc

SEQ ID NO: 62078 - DNA, 40 bp, Homo Sapiens; identical to SEQ ID NO: 25885

SEQ ID NO: 62079 - DNA, 40 bp, Homo Sapiens; identical to SEQ ID NO: 25854

SEQ ID NO: 62080 - DNA, 17 bp, Homo Sapiens
tccggatcagaagattg

SEQ ID NO: 62081 - DNA, 34 bp, Homo Sapiens; identical to SEQ ID NO: 25762

SEQ ID NO: 62082 - DNA, 24 bp, Homo Sapiens
tccgaggtgattttcatattgaat

SEQ ID NO: 62083 - DNA, 21 bp, Homo Sapiens
tccgaggtgattttcatattg

SEQ ID NO: 62084 - DNA, 20 bp, Homo Sapiens
tccgaggtgattttcatatt

SEQ ID NO: 62085 - DNA, 16 bp, Homo Sapiens
tccgaggtgattttca

SEQ ID NO: 62086 - DNA, 16 bp, Homo Sapiens
tccctgttcaggcgcc

SEQ ID NO: 62087 - DNA, 27 bp, Homo Sapiens
tccctggttcaaatccgggtgccccct

SEQ ID NO: 62088 - DNA, 43 bp, Homo Sapiens; identical to SEQ ID NO: 25713

SEQ ID NO: 62089 - DNA, 40 bp, Homo Sapiens; identical to SEQ ID NO: 25685

SEQ ID NO: 62090 - DNA, 40 bp, Homo Sapiens; identical to SEQ ID NO: 25616

SEQ ID NO: 62091 - DNA, 40 bp, Homo Sapiens; identical to SEQ ID NO: 25564

SEQ ID NO: 62092 - DNA, 34 bp, Homo Sapiens; identical to SEQ ID NO: 25408

SEQ ID NO: 62093 - DNA, 24 bp, Homo Sapiens
tccaggttcgactcctggctggct

SEQ ID NO: 62094 - DNA, 21 bp, Homo Sapiens
tccaggttcgactcctggctg

SEQ ID NO: 62095 - DNA, 28 bp, Homo Sapiens
tccagggttcaagtccctgttcaggcgc

SEQ ID NO: 62096 - DNA, 36 bp, Homo Sapiens; identical to SEQ ID NO: 25339

SEQ ID NO: 62097 - DNA, 18 bp, Homo Sapiens
tccaagcagttgacccgg

SEQ ID NO: 62098 - DNA, 34 bp, Homo Sapiens; identical to SEQ ID NO: 25300

SEQ ID NO: 62099 - DNA, 25 bp, Homo Sapiens
tcataatctgaaggtcgtgagttcg

SEQ ID NO: 62100 - DNA, 38 bp, Homo Sapiens; identical to SEQ ID NO: 25208

SEQ ID NO: 62101 - DNA, 33 bp, Homo Sapiens; identical to SEQ ID NO: 25200

SEQ ID NO: 62102 - DNA, 36 bp, Homo Sapiens; identical to SEQ ID NO: 25188

SEQ ID NO: 62103 - DNA, 35 bp, Homo Sapiens; identical to SEQ ID NO: 25187

SEQ ID NO: 62104 - DNA, 28 bp, Homo Sapiens
tcagtggtagaattctcgcctgccacgc

SEQ ID NO: 62105 - DNA, 31 bp, Homo Sapiens; identical to SEQ ID NO: 25127

SEQ ID NO: 62106 - DNA, 39 bp, Homo Sapiens; identical to SEQ ID NO: 25112

SEQ ID NO: 62107 - DNA, 30 bp, Homo Sapiens; identical to SEQ ID NO: 25109

SEQ ID NO: 62108 - DNA, 25 bp, Homo Sapiens
tcagtcggtagagcatgagaccctt

SEQ ID NO: 62109 - DNA, 24 bp, Homo Sapiens
tcagtcggtagagcatgagaccct

SEQ ID NO: 62110 - DNA, 23 bp, Homo Sapiens
tcagtcggtagagcatgagaccc

SEQ ID NO: 62111 - DNA, 19 bp, Homo Sapiens
tcaggggtagagcatttga

SEQ ID NO: 62112 - DNA, 25 bp, Homo Sapiens
tcaggatggccgagtggtctaaggc

SEQ ID NO: 62113 - DNA, 27 bp, Homo Sapiens
tcagctaaataagctatcgggcccata

SEQ ID NO: 62114 - DNA, 21 bp, Homo Sapiens
tcagctaaataagctatcggg

SEQ ID NO: 62115 - DNA, 24 bp, Homo Sapiens
tcagattgtgaatctgacaacaga

SEQ ID NO: 62116 - DNA, 26 bp, Homo Sapiens
tcacacgcgaaaggtccccggttcga

SEQ ID NO: 62117 - DNA, 48 bp, Homo Sapiens; identical to SEQ ID NO: 24785

SEQ ID NO: 62118 - DNA, 18 bp, Homo Sapiens
tcaagaggtccctggttc

SEQ ID NO: 62119 - DNA, 38 bp, Homo Sapiens; identical to SEQ ID NO: 24671

SEQ ID NO: 62120 - DNA, 22 bp, Homo Sapiens
tcaaagttaaattataggctaa

SEQ ID NO: 62121 - DNA, 21 bp, Homo Sapiens
tcaaagttaaattataggcta

SEQ ID NO: 62122 - DNA, 32 bp, Homo Sapiens; identical to SEQ ID NO: 24640

SEQ ID NO: 62123 - DNA, 35 bp, Homo Sapiens; identical to SEQ ID NO: 24626

SEQ ID NO: 62124 - DNA, 48 bp, Homo Sapiens; identical to SEQ ID NO: 24607

SEQ ID NO: 62125 - DNA, 27 bp, Homo Sapiens
tatgtccgcgtgggttcgaaccccact

SEQ ID NO: 62126 - DNA, 34 bp, Homo Sapiens; identical to SEQ ID NO: 24577

SEQ ID NO: 62127 - DNA, 20 bp, Homo Sapiens
tatggtctagcggttaggat

SEQ ID NO: 62128 - DNA, 33 bp, Homo Sapiens; identical to SEQ ID NO: 24519

SEQ ID NO: 62129 - DNA, 32 bp, Homo Sapiens; identical to SEQ ID NO: 24518

SEQ ID NO: 62130 - DNA, 23 bp, Homo Sapiens
tatcgggcccataccccgaaaat

SEQ ID NO: 62131 - DNA, 22 bp, Homo Sapiens
tatcgggcccataccccgaaaa

SEQ ID NO: 62132 - DNA, 19 bp, Homo Sapiens
tatcgggcccataccccga

SEQ ID NO: 62133 - DNA, 18 bp, Homo Sapiens
tatcgggcccataccccg

SEQ ID NO: 62134 - DNA, 41 bp, Homo Sapiens; identical to SEQ ID NO: 24497

SEQ ID NO: 62135 - DNA, 28 bp, Homo Sapiens
tatagtttaaccaaaacatcagattgtg

SEQ ID NO: 62136 - DNA, 17 bp, Homo Sapiens
tatagtggttagtatcc

SEQ ID NO: 62137 - DNA, 26 bp, Homo Sapiens
tatagtggttagcatagctgccttcc

SEQ ID NO: 62138 - DNA, 16 bp, Homo Sapiens
tatagtggtgagtatc

SEQ ID NO: 62139 - DNA, 31 bp, Homo Sapiens; identical to SEQ ID NO: 24360

SEQ ID NO: 62140 - DNA, 41 bp, Homo Sapiens; identical to SEQ ID NO: 24242

SEQ ID NO: 62141 - DNA, 33 bp, Homo Sapiens; identical to SEQ ID NO: 24144

SEQ ID NO: 62142 - DNA, 25 bp, Homo Sapiens
taggtcgctggttcgattccggctc

SEQ ID NO: 62143 - DNA, 23 bp, Homo Sapiens
taggattcggcgctttcaccgcc

SEQ ID NO: 62144 - DNA, 19 bp, Homo Sapiens
taggattcggcgctttcac

SEQ ID NO: 62145 - DNA, 48 bp, Homo Sapiens; identical to SEQ ID NO: 24088

SEQ ID NO: 62146 - DNA, 37 bp, Homo Sapiens; identical to SEQ ID NO: 24085

SEQ ID NO: 62147 - DNA, 24 bp, Homo Sapiens
taggattcctggttttcacccagg

SEQ ID NO: 62148 - DNA, 18 bp, Homo Sapiens
taggagatttcaacttaa

SEQ ID NO: 62149 - DNA, 34 bp, Homo Sapiens; identical to SEQ ID NO: 23987

SEQ ID NO: 62150 - DNA, 30 bp, Homo Sapiens; identical to SEQ ID NO: 23972

SEQ ID NO: 62151 - DNA, 32 bp, Homo Sapiens; identical to SEQ ID NO: 23969

SEQ ID NO: 62152 - DNA, 41 bp, Homo Sapiens; identical to SEQ ID NO: 23960

SEQ ID NO: 62153 - DNA, 35 bp, Homo Sapiens; identical to SEQ ID NO: 23957

SEQ ID NO: 62154 - DNA, 27 bp, Homo Sapiens
tagctgttaactaagtgtttgtgggtt

SEQ ID NO: 62155 - DNA, 48 bp, Homo Sapiens; identical to SEQ ID NO: 23932

SEQ ID NO: 62156 - DNA, 42 bp, Homo Sapiens; identical to SEQ ID NO: 23928

SEQ ID NO: 62157 - DNA, 34 bp, Homo Sapiens; identical to SEQ ID NO: 23927

SEQ ID NO: 62158 - DNA, 48 bp, Homo Sapiens; identical to SEQ ID NO: 23915

SEQ ID NO: 62159 - DNA, 34 bp, Homo Sapiens; identical to SEQ ID NO: 23910

SEQ ID NO: 62160 - DNA, 27 bp, Homo Sapiens
tagctcagtcggtagagcatgagactc

SEQ ID NO: 62161 - DNA, 28 bp, Homo Sapiens
tagctcagtcggtagagcatgagaccct

SEQ ID NO: 62162 - DNA, 27 bp, Homo Sapiens
tagctcagtcggtagagcatgagaccc

SEQ ID NO: 62163 - DNA, 26 bp, Homo Sapiens
tagctcagtcggtagagcataagact

SEQ ID NO: 62164 - DNA, 25 bp, Homo Sapiens
tagctcagtcggtagagcataagac

SEQ ID NO: 62165 - DNA, 17 bp, Homo Sapiens
tagctcaggcggtagag

SEQ ID NO: 62166 - DNA, 36 bp, Homo Sapiens; identical to SEQ ID NO: 23843

SEQ ID NO: 62167 - DNA, 48 bp, Homo Sapiens; identical to SEQ ID NO: 23772

SEQ ID NO: 62168 - DNA, 39 bp, Homo Sapiens; identical to SEQ ID NO: 23767

SEQ ID NO: 62169 - DNA, 33 bp, Homo Sapiens; identical to SEQ ID NO: 23722

SEQ ID NO: 62170 - DNA, 32 bp, Homo Sapiens; identical to SEQ ID NO: 23721

SEQ ID NO: 62171 - DNA, 23 bp, Homo Sapiens
tagagcatgggactcttaatctc

SEQ ID NO: 62172 - DNA, 32 bp, Homo Sapiens; identical to SEQ ID NO: 23710

SEQ ID NO: 62173 - DNA, 34 bp, Homo Sapiens; identical to SEQ ID NO: 23693

SEQ ID NO: 62174 - DNA, 33 bp, Homo Sapiens; identical to SEQ ID NO: 23692

SEQ ID NO: 62175 - DNA, 32 bp, Homo Sapiens; identical to SEQ ID NO: 23691

SEQ ID NO: 62176 - DNA, 31 bp, Homo Sapiens; identical to SEQ ID NO: 23653

SEQ ID NO: 62177 - DNA, 25 bp, Homo Sapiens
tagaattctcgcctgccacgcggga

SEQ ID NO: 62178 - DNA, 48 bp, Homo Sapiens; identical to SEQ ID NO: 23640

SEQ ID NO: 62179 - DNA, 35 bp, Homo Sapiens; identical to SEQ ID NO: 23584

SEQ ID NO: 62180 - DNA, 20 bp, Homo Sapiens
taccccgaaaatgttggtta

SEQ ID NO: 62181 - DNA, 27 bp, Homo Sapiens
tacacttaggagatttcaacttaactt

SEQ ID NO: 62182 - DNA, 48 bp, Homo Sapiens; identical to SEQ ID NO: 23495

SEQ ID NO: 62183 - DNA, 33 bp, Homo Sapiens; identical to SEQ ID NO: 23457

SEQ ID NO: 62184 - DNA, 30 bp, Homo Sapiens; identical to SEQ ID NO: 23456

SEQ ID NO: 62185 - DNA, 26 bp, Homo Sapiens
taatggtggagttaaagactttttct

SEQ ID NO: 62186 - DNA, 37 bp, Homo Sapiens; identical to SEQ ID NO: 23333

SEQ ID NO: 62187 - DNA, 38 bp, Homo Sapiens; identical to SEQ ID NO: 23332

SEQ ID NO: 62188 - DNA, 24 bp, Homo Sapiens
taatcgcataaaacttaaaacttt

SEQ ID NO: 62189 - DNA, 20 bp, Homo Sapiens
taatccattgtgctctgcac

SEQ ID NO: 62190 - DNA, 41 bp, Homo Sapiens; identical to SEQ ID NO: 23279

SEQ ID NO: 62191 - DNA, 26 bp, Homo Sapiens
taagttaaagattaagagaaccaaca

SEQ ID NO: 62192 - DNA, 48 bp, Homo Sapiens; identical to SEQ ID NO: 23238

SEQ ID NO: 62193 - DNA, 43 bp, Homo Sapiens; identical to SEQ ID NO: 23235

SEQ ID NO: 62194 - DNA, 27 bp, Homo Sapiens
taaggtcagctaaataagctatcgggc

SEQ ID NO: 62195 - DNA, 24 bp, Homo Sapiens
taaggtcagctaaataagctatcg

SEQ ID NO: 62196 - DNA, 17 bp, Homo Sapiens
taaggtcagctaaataa

SEQ ID NO: 62197 - DNA, 37 bp, Homo Sapiens; identical to SEQ ID NO: 23202

SEQ ID NO: 62198 - DNA, 19 bp, Homo Sapiens
taagctatcgggcccatac

SEQ ID NO: 62199 - DNA, 23 bp, Homo Sapiens
taagagaaccaacacctctttac

SEQ ID NO: 62200 - DNA, 30 bp, Homo Sapiens; identical to SEQ ID NO: 23107

SEQ ID NO: 62201 - DNA, 40 bp, Homo Sapiens; identical to SEQ ID NO: 23044

SEQ ID NO: 62202 - DNA, 38 bp, Homo Sapiens; identical to SEQ ID NO: 23042

SEQ ID NO: 62203 - DNA, 35 bp, Homo Sapiens; identical to SEQ ID NO: 23040

SEQ ID NO: 62204 - DNA, 31 bp, Homo Sapiens; identical to SEQ ID NO: 23039

SEQ ID NO: 62205 - DNA, 18 bp, Homo Sapiens
taactaagtgtttgtggg

SEQ ID NO: 62206 - DNA, 34 bp, Homo Sapiens; identical to SEQ ID NO: 23030

SEQ ID NO: 62207 - DNA, 48 bp, Homo Sapiens; identical to SEQ ID NO: 23010

SEQ ID NO: 62208 - DNA, 29 bp, Homo Sapiens
taaccttttaagttaaagattaagagaac

SEQ ID NO: 62209 - DNA, 40 bp, Homo Sapiens; identical to SEQ ID NO: 22974

SEQ ID NO: 62210 - DNA, 36 bp, Homo Sapiens; identical to SEQ ID NO: 22970

SEQ ID NO: 62211 - DNA, 34 bp, Homo Sapiens; identical to SEQ ID NO: 22968

SEQ ID NO: 62212 - DNA, 29 bp, Homo Sapiens
taacagctatccattggtcttaggcccca

SEQ ID NO: 62213 - DNA, 46 bp, Homo Sapiens; identical to SEQ ID NO: 22941

SEQ ID NO: 62214 - DNA, 41 bp, Homo Sapiens; identical to SEQ ID NO: 22936

SEQ ID NO: 62215 - DNA, 35 bp, Homo Sapiens; identical to SEQ ID NO: 22873

SEQ ID NO: 62216 - DNA, 20 bp, Homo Sapiens
taaatagtaccgttaacttc

SEQ ID NO: 62217 - DNA, 19 bp, Homo Sapiens
taaataataggagcttaaa

SEQ ID NO: 62218 - DNA, 34 bp, Homo Sapiens; identical to SEQ ID NO: 22823

SEQ ID NO: 62219 - DNA, 27 bp, Homo Sapiens
taaaggataacagctatccattggtct

SEQ ID NO: 62220 - DNA, 16 bp, Homo Sapiens
taaagactttttctct

SEQ ID NO: 62221 - DNA, 25 bp, Homo Sapiens
taaagacaggggttaggcctctttt

SEQ ID NO: 62222 - DNA, 25 bp, Homo Sapiens
taaaccggagatgaaaacctttttc

SEQ ID NO: 62223 - DNA, 30 bp, Homo Sapiens; identical to SEQ ID NO: 22648

SEQ ID NO: 62224 - DNA, 36 bp, Homo Sapiens; identical to SEQ ID NO: 22641

SEQ ID NO: 62225 - DNA, 26 bp, Homo Sapiens
taaaacttaaaactttacagtcagag

SEQ ID NO: 62226 - DNA, 31 bp, Homo Sapiens; identical to SEQ ID NO: 22605

SEQ ID NO: 62227 - DNA, 39 bp, Homo Sapiens; identical to SEQ ID NO: 22579

SEQ ID NO: 62228 - DNA, 36 bp, Homo Sapiens; identical to SEQ ID NO: 22576

SEQ ID NO: 62229 - DNA, 32 bp, Homo Sapiens; identical to SEQ ID NO: 22560

SEQ ID NO: 62230 - DNA, 32 bp, Homo Sapiens; identical to SEQ ID NO: 22556

SEQ ID NO: 62231 - DNA, 44 bp, Homo Sapiens; identical to SEQ ID NO: 22552

SEQ ID NO: 62232 - DNA, 37 bp, Homo Sapiens; identical to SEQ ID NO: 22497

SEQ ID NO: 62233 - DNA, 37 bp, Homo Sapiens; identical to SEQ ID NO: 22478

SEQ ID NO: 62234 - DNA, 36 bp, Homo Sapiens; identical to SEQ ID NO: 22407

SEQ ID NO: 62235 - DNA, 30 bp, Homo Sapiens; identical to SEQ ID NO: 22381

SEQ ID NO: 62236 - DNA, 34 bp, Homo Sapiens; identical to SEQ ID NO: 22333

SEQ ID NO: 62237 - DNA, 32 bp, Homo Sapiens; identical to SEQ ID NO: 22315

SEQ ID NO: 62238 - DNA, 48 bp, Homo Sapiens; identical to SEQ ID NO: 22254

SEQ ID NO: 62239 - DNA, 40 bp, Homo Sapiens; identical to SEQ ID NO: 22230

SEQ ID NO: 62240 - DNA, 37 bp, Homo Sapiens; identical to SEQ ID NO: 22227

SEQ ID NO: 62241 - DNA, 32 bp, Homo Sapiens; identical to SEQ ID NO: 22222

SEQ ID NO: 62242 - DNA, 48 bp, Homo Sapiens; identical to SEQ ID NO: 22200

SEQ ID NO: 62243 - DNA, 17 bp, Homo Sapiens
gttcgatccccgtacgg

SEQ ID NO: 62244 - DNA, 23 bp, Homo Sapiens
gttcgagtcccacctggggtgcc

SEQ ID NO: 62245 - DNA, 16 bp, Homo Sapiens
gttcgagcctcacctg

SEQ ID NO: 62246 - DNA, 44 bp, Homo Sapiens; identical to SEQ ID NO: 22002

SEQ ID NO: 62247 - DNA, 33 bp, Homo Sapiens; identical to SEQ ID NO: 21998

SEQ ID NO: 62248 - DNA, 36 bp, Homo Sapiens; identical to SEQ ID NO: 21986

SEQ ID NO: 62249 - DNA, 31 bp, Homo Sapiens; identical to SEQ ID NO: 21968

SEQ ID NO: 62250 - DNA, 34 bp, Homo Sapiens; identical to SEQ ID NO: 21957

SEQ ID NO: 62251 - DNA, 23 bp, Homo Sapiens
gttcaagtccctgttcaggcgcc

SEQ ID NO: 62252 - DNA, 19 bp, Homo Sapiens
gttatcacatctgctttac

SEQ ID NO: 62253 - DNA, 16 bp, Homo Sapiens
gttatcacatctgctt

SEQ ID NO: 62254 - DNA, 27 bp, Homo Sapiens
gttaacttccaattaactagttttgac

SEQ ID NO: 62255 - DNA, 43 bp, Homo Sapiens; identical to SEQ ID NO: 21682

SEQ ID NO: 62256 - DNA, 27 bp, Homo Sapiens
gtgtttgtgggtttaagtcccattggt

SEQ ID NO: 62257 - DNA, 45 bp, Homo Sapiens; identical to SEQ ID NO: 21591

SEQ ID NO: 62258 - DNA, 46 bp, Homo Sapiens; identical to SEQ ID NO: 21546

SEQ ID NO: 62259 - DNA, 40 bp, Homo Sapiens; identical to SEQ ID NO: 21541

SEQ ID NO: 62260 - DNA, 32 bp, Homo Sapiens; identical to SEQ ID NO: 21510

SEQ ID NO: 62261 - DNA, 44 bp, Homo Sapiens; identical to SEQ ID NO: 21494

SEQ ID NO: 62262 - DNA, 42 bp, Homo Sapiens; identical to SEQ ID NO: 21493

SEQ ID NO: 62263 - DNA, 19 bp, Homo Sapiens
gtggttatcacatctgctt

SEQ ID NO: 62264 - DNA, 37 bp, Homo Sapiens; identical to SEQ ID NO: 21409

SEQ ID NO: 62265 - DNA, 34 bp, Homo Sapiens; identical to SEQ ID NO: 21406

SEQ ID NO: 62266 - DNA, 40 bp, Homo Sapiens; identical to SEQ ID NO: 21196

SEQ ID NO: 62267 - DNA, 31 bp, Homo Sapiens; identical to SEQ ID NO: 21193

SEQ ID NO: 62268 - DNA, 34 bp, Homo Sapiens; identical to SEQ ID NO: 21187

SEQ ID NO: 62269 - DNA, 32 bp, Homo Sapiens; identical to SEQ ID NO: 21185

SEQ ID NO: 62270 - DNA, 31 bp, Homo Sapiens; identical to SEQ ID NO: 21184

SEQ ID NO: 62271 - DNA, 35 bp, Homo Sapiens; identical to SEQ ID NO: 21110

SEQ ID NO: 62272 - DNA, 28 bp, Homo Sapiens
gtgaatctgacaacagaggcttacgacc

SEQ ID NO: 62273 - DNA, 37 bp, Homo Sapiens; identical to SEQ ID NO: 21043

SEQ ID NO: 62274 - DNA, 16 bp, Homo Sapiens
gtctagtggctaggat

SEQ ID NO: 62275 - DNA, 18 bp, Homo Sapiens
gtcgtgggttcgagcccc

SEQ ID NO: 62276 - DNA, 17 bp, Homo Sapiens
gtcgtgggttcgagccc

SEQ ID NO: 62277 - DNA, 38 bp, Homo Sapiens; identical to SEQ ID NO: 20914

SEQ ID NO: 62278 - DNA, 37 bp, Homo Sapiens; identical to SEQ ID NO: 20913

SEQ ID NO: 62279 - DNA, 36 bp, Homo Sapiens; identical to SEQ ID NO: 20912

SEQ ID NO: 62280 - DNA, 29 bp, Homo Sapiens
gtcggtagagcatgggactcttaatccca

SEQ ID NO: 62281 - DNA, 39 bp, Homo Sapiens; identical to SEQ ID NO: 20892

SEQ ID NO: 62282 - DNA, 36 bp, Homo Sapiens; identical to SEQ ID NO: 20889

SEQ ID NO: 62283 - DNA, 29 bp, Homo Sapiens
gtcggtagagcatgagactcttaatctca

SEQ ID NO: 62284 - DNA, 27 bp, Homo Sapiens
gtcggtagagcatgagacccttaatct

SEQ ID NO: 62285 - DNA, 25 bp, Homo Sapiens
gtcggtagagcatgagacccttaat

SEQ ID NO: 62286 - DNA, 21 bp, Homo Sapiens
gtcggtagagcatgagaccct

SEQ ID NO: 62287 - DNA, 20 bp, Homo Sapiens
gtcggtagagcatgagaccc

SEQ ID NO: 62288 - DNA, 19 bp, Homo Sapiens
gtcggtagagcatgagacc

SEQ ID NO: 62289 - DNA, 39 bp, Homo Sapiens; identical to SEQ ID NO: 20817

SEQ ID NO: 62290 - DNA, 31 bp, Homo Sapiens; identical to SEQ ID NO: 20788

SEQ ID NO: 62291 - DNA, 34 bp, Homo Sapiens; identical to SEQ ID NO: 20780

SEQ ID NO: 62292 - DNA, 33 bp, Homo Sapiens; identical to SEQ ID NO: 20779

SEQ ID NO: 62293 - DNA, 29 bp, Homo Sapiens
gtccgcgtgggttcgaaccccactcctgg

SEQ ID NO: 62294 - DNA, 17 bp, Homo Sapiens
gtccctgttcaggcacc

SEQ ID NO: 62295 - DNA, 18 bp, Homo Sapiens
gtcccggcagagatgcca

SEQ ID NO: 62296 - DNA, 35 bp, Homo Sapiens; identical to SEQ ID NO: 20732

SEQ ID NO: 62297 - DNA, 17 bp, Homo Sapiens
gtcaggatggccgagca

SEQ ID NO: 62298 - DNA, 28 bp, Homo Sapiens
gtcagctaaataagctatcgggcccata

SEQ ID NO: 62299 - DNA, 23 bp, Homo Sapiens
gtcagctaaataagctatcgggc

SEQ ID NO: 62300 - DNA, 19 bp, Homo Sapiens
gtcagaggttcaattcctc

SEQ ID NO: 62301 - DNA, 35 bp, Homo Sapiens; identical to SEQ ID NO: 20629

SEQ ID NO: 62302 - DNA, 33 bp, Homo Sapiens; identical to SEQ ID NO: 20573

SEQ ID NO: 62303 - DNA, 21 bp, Homo Sapiens
gtatagtggttagcatagctg

SEQ ID NO: 62304 - DNA, 30 bp, Homo Sapiens; identical to SEQ ID NO: 20531

SEQ ID NO: 62305 - DNA, 31 bp, Homo Sapiens; identical to SEQ ID NO: 20523

SEQ ID NO: 62306 - DNA, 33 bp, Homo Sapiens; identical to SEQ ID NO: 20513

SEQ ID NO: 62307 - DNA, 28 bp, Homo Sapiens
gtagtggttatcacgttcgcctcacacg

SEQ ID NO: 62308 - DNA, 28 bp, Homo Sapiens
gtagcttacctcctcaaagcaatacact

SEQ ID NO: 62309 - DNA, 35 bp, Homo Sapiens; identical to SEQ ID NO: 20410

SEQ ID NO: 62310 - DNA, 33 bp, Homo Sapiens; identical to SEQ ID NO: 20408

SEQ ID NO: 62311 - DNA, 24 bp, Homo Sapiens
gtagagcatgggactcttaatccc

SEQ ID NO: 62312 - DNA, 34 bp, Homo Sapiens; identical to SEQ ID NO: 20393

SEQ ID NO: 62313 - DNA, 23 bp, Homo Sapiens
gtagagcatgagactcttaatct

SEQ ID NO: 62314 - DNA, 20 bp, Homo Sapiens
gtagagcatgagactcttaa

SEQ ID NO: 62315 - DNA, 23 bp, Homo Sapiens
gtagagcatgagacccttaatct

SEQ ID NO: 62316 - DNA, 16 bp, Homo Sapiens
gtagagcatgagaccc

SEQ ID NO: 62317 - DNA, 33 bp, Homo Sapiens; identical to SEQ ID NO: 20338

SEQ ID NO: 62318 - DNA, 42 bp, Homo Sapiens; identical to SEQ ID NO: 20331

SEQ ID NO: 62319 - DNA, 34 bp, Homo Sapiens; identical to SEQ ID NO: 20314

SEQ ID NO: 62320 - DNA, 16 bp, Homo Sapiens
gtaatggtgagcactc

SEQ ID NO: 62321 - DNA, 20 bp, Homo Sapiens
gtaatggtaagcactctgga

SEQ ID NO: 62322 - DNA, 32 bp, Homo Sapiens; identical to SEQ ID NO: 20281

SEQ ID NO: 62323 - DNA, 41 bp, Homo Sapiens; identical to SEQ ID NO: 20216

SEQ ID NO: 62324 - DNA, 33 bp, Homo Sapiens; identical to SEQ ID NO: 20206

SEQ ID NO: 62325 - DNA, 45 bp, Homo Sapiens; identical to SEQ ID NO: 20165

SEQ ID NO: 62326 - DNA, 41 bp, Homo Sapiens; identical to SEQ ID NO: 20161

SEQ ID NO: 62327 - DNA, 40 bp, Homo Sapiens; identical to SEQ ID NO: 20160

SEQ ID NO: 62328 - DNA, 39 bp, Homo Sapiens; identical to SEQ ID NO: 20159

SEQ ID NO: 62329 - DNA, 38 bp, Homo Sapiens; identical to SEQ ID NO: 20158

SEQ ID NO: 62330 - DNA, 20 bp, Homo Sapiens
ggttcgattcccggccaatg

SEQ ID NO: 62331 - DNA, 24 bp, Homo Sapiens
ggttcgatcccgggcggaaacacc

SEQ ID NO: 62332 - DNA, 48 bp, Homo Sapiens; identical to SEQ ID NO: 19948

SEQ ID NO: 62333 - DNA, 34 bp, Homo Sapiens; identical to SEQ ID NO: 19911

SEQ ID NO: 62334 - DNA, 32 bp, Homo Sapiens; identical to SEQ ID NO: 19909

SEQ ID NO: 62335 - DNA, 38 bp, Homo Sapiens; identical to SEQ ID NO: 19900

SEQ ID NO: 62336 - DNA, 37 bp, Homo Sapiens; identical to SEQ ID NO: 19888

SEQ ID NO: 62337 - DNA, 22 bp, Homo Sapiens
ggttatcacgtctgctttacac

SEQ ID NO: 62338 - DNA, 39 bp, Homo Sapiens; identical to SEQ ID NO: 19763

SEQ ID NO: 62339 - DNA, 17 bp, Homo Sapiens
ggttagcgcgttcggct

SEQ ID NO: 62340 - DNA, 40 bp, Homo Sapiens; identical to SEQ ID NO: 19720

SEQ ID NO: 62341 - DNA, 40 bp, Homo Sapiens; identical to SEQ ID NO: 19702

SEQ ID NO: 62342 - DNA, 28 bp, Homo Sapiens
ggtgtaatggtgagcactctggactctg

SEQ ID NO: 62343 - DNA, 33 bp, Homo Sapiens; identical to SEQ ID NO: 19576

SEQ ID NO: 62344 - DNA, 26 bp, Homo Sapiens
ggtgctaatggtggagttaaagactt

SEQ ID NO: 62345 - DNA, 24 bp, Homo Sapiens
ggtctccaatggaggcgtgggttc

SEQ ID NO: 62346 - DNA, 31 bp, Homo Sapiens; identical to SEQ ID NO: 19410

SEQ ID NO: 62347 - DNA, 28 bp, Homo Sapiens
ggtcgcgggttcgatccccgtacgggcc

SEQ ID NO: 62348 - DNA, 47 bp, Homo Sapiens; identical to SEQ ID NO: 19346

SEQ ID NO: 62349 - DNA, 28 bp, Homo Sapiens
ggtcagctaaataagctatcgggcccat

SEQ ID NO: 62350 - DNA, 17 bp, Homo Sapiens
ggtatgattctcgctta

SEQ ID NO: 62351 - DNA, 23 bp, Homo Sapiens
ggtagctcagtcggtagagcatc

SEQ ID NO: 62352 - DNA, 33 bp, Homo Sapiens; identical to SEQ ID NO: 19281

SEQ ID NO: 62353 - DNA, 40 bp, Homo Sapiens; identical to SEQ ID NO: 19243

SEQ ID NO: 62354 - DNA, 36 bp, Homo Sapiens; identical to SEQ ID NO: 19222

SEQ ID NO: 62355 - DNA, 18 bp, Homo Sapiens
ggtagagcatgagaccct

SEQ ID NO: 62356 - DNA, 17 bp, Homo Sapiens
ggtagagcatgagaccc

SEQ ID NO: 62357 - DNA, 16 bp, Homo Sapiens
ggtagagcatgagacc

SEQ ID NO: 62358 - DNA, 34 bp, Homo Sapiens; identical to SEQ ID NO: 19196

SEQ ID NO: 62359 - DNA, 33 bp, Homo Sapiens; identical to SEQ ID NO: 19195

SEQ ID NO: 62360 - DNA, 28 bp, Homo Sapiens
ggtaatcgcataaaacttaaaactttac

SEQ ID NO: 62361 - DNA, 36 bp, Homo Sapiens; identical to SEQ ID NO: 19152

SEQ ID NO: 62362 - DNA, 41 bp, Homo Sapiens; identical to SEQ ID NO: 19129

SEQ ID NO: 62363 - DNA, 39 bp, Homo Sapiens; identical to SEQ ID NO: 19127

SEQ ID NO: 62364 - DNA, 27 bp, Homo Sapiens
gggtgtagctcagtggtagagcatttg

SEQ ID NO: 62365 - DNA, 21 bp, Homo Sapiens
gggtggttcagtggtagaatt

SEQ ID NO: 62366 - DNA, 21 bp, Homo Sapiens
gggtcgtgggttcgagcccca

SEQ ID NO: 62367 - DNA, 18 bp, Homo Sapiens
ggggttcgattccttcct

SEQ ID NO: 62368 - DNA, 32 bp, Homo Sapiens; identical to SEQ ID NO: 18822

SEQ ID NO: 62369 - DNA, 28 bp, Homo Sapiens
ggggtatagctcagtggtagagcatttg

SEQ ID NO: 62370 - DNA, 34 bp, Homo Sapiens; identical to SEQ ID NO: 18767

SEQ ID NO: 62371 - DNA, 33 bp, Homo Sapiens; identical to SEQ ID NO: 18716

SEQ ID NO: 62372 - DNA, 27 bp, Homo Sapiens
ggggcgtgggttcgaatcccaccgctg

SEQ ID NO: 62373 - DNA, 32 bp, Homo Sapiens; identical to SEQ ID NO: 18677

SEQ ID NO: 62374 - DNA, 28 bp, Homo Sapiens
gggcccataccccgaaaatgttggttat

SEQ ID NO: 62375 - DNA, 33 bp, Homo Sapiens; identical to SEQ ID NO: 18529

SEQ ID NO: 62376 - DNA, 30 bp, Homo Sapiens; identical to SEQ ID NO: 18502

SEQ ID NO: 62377 - DNA, 20 bp, Homo Sapiens
ggctgagtgaagcattggac

SEQ ID NO: 62378 - DNA, 35 bp, Homo Sapiens; identical to SEQ ID NO: 18413

SEQ ID NO: 62379 - DNA, 48 bp, Homo Sapiens; identical to SEQ ID NO: 18379

SEQ ID NO: 62380 - DNA, 48 bp, Homo Sapiens; identical to SEQ ID NO: 18364

SEQ ID NO: 62381 - DNA, 31 bp, Homo Sapiens; identical to SEQ ID NO: 18353

SEQ ID NO: 62382 - DNA, 48 bp, Homo Sapiens; identical to SEQ ID NO: 18318

SEQ ID NO: 62383 - DNA, 47 bp, Homo Sapiens; identical to SEQ ID NO: 18317

SEQ ID NO: 62384 - DNA, 29 bp, Homo Sapiens
ggcgctctcaccgccgcggcccgggttcg

SEQ ID NO: 62385 - DNA, 28 bp, Homo Sapiens
ggcgctctcaccgccgcggcccgggttc

SEQ ID NO: 62386 - DNA, 16 bp, Homo Sapiens
ggcgcaatcggttagc

SEQ ID NO: 62387 - DNA, 34 bp, Homo Sapiens; identical to SEQ ID NO: 18197

SEQ ID NO: 62388 - DNA, 42 bp, Homo Sapiens; identical to SEQ ID NO: 18174

SEQ ID NO: 62389 - DNA, 34 bp, Homo Sapiens; identical to SEQ ID NO: 18138

SEQ ID NO: 62390 - DNA, 31 bp, Homo Sapiens; identical to SEQ ID NO: 18135

SEQ ID NO: 62391 - DNA, 35 bp, Homo Sapiens; identical to SEQ ID NO: 18134

SEQ ID NO: 62392 - DNA, 26 bp, Homo Sapiens
ggcagagcccggtaatcgcataaaac

SEQ ID NO: 62393 - DNA, 39 bp, Homo Sapiens; identical to SEQ ID NO: 18109

SEQ ID NO: 62394 - DNA, 37 bp, Homo Sapiens; identical to SEQ ID NO: 18108

SEQ ID NO: 62395 - DNA, 26 bp, Homo Sapiens
ggattcggcgctctcaccgccgcggc

SEQ ID NO: 62396 - DNA, 29 bp, Homo Sapiens
ggattcctggttttcacccaggcggcccg

SEQ ID NO: 62397 - DNA, 27 bp, Homo Sapiens
ggatgggttcgattctcatagtcctag

SEQ ID NO: 62398 - DNA, 44 bp, Homo Sapiens; identical to SEQ ID NO: 17898

SEQ ID NO: 62399 - DNA, 47 bp, Homo Sapiens; identical to SEQ ID NO: 17896

SEQ ID NO: 62400 - DNA, 46 bp, Homo Sapiens; identical to SEQ ID NO: 17895

SEQ ID NO: 62401 - DNA, 41 bp, Homo Sapiens; identical to SEQ ID NO: 17862

SEQ ID NO: 62402 - DNA, 33 bp, Homo Sapiens; identical to SEQ ID NO: 17773

SEQ ID NO: 62403 - DNA, 26 bp, Homo Sapiens
gctggttcgattccggctcgaaggac

SEQ ID NO: 62404 - DNA, 32 bp, Homo Sapiens; identical to SEQ ID NO: 17696

SEQ ID NO: 62405 - DNA, 48 bp, Homo Sapiens; identical to SEQ ID NO: 17689

SEQ ID NO: 62406 - DNA, 44 bp, Homo Sapiens; identical to SEQ ID NO: 17672

SEQ ID NO: 62407 - DNA, 29 bp, Homo Sapiens
gctctcaccgccgcggcccgggttcgatt

SEQ ID NO: 62408 - DNA, 29 bp, Homo Sapiens
gctccgtggcgcaatggatagcgcattgg

SEQ ID NO: 62409 - DNA, 45 bp, Homo Sapiens; identical to SEQ ID NO: 17637

SEQ ID NO: 62410 - DNA, 33 bp, Homo Sapiens; identical to SEQ ID NO: 17631

SEQ ID NO: 62411 - DNA, 46 bp, Homo Sapiens; identical to SEQ ID NO: 17597

SEQ ID NO: 62412 - DNA, 32 bp, Homo Sapiens; identical to SEQ ID NO: 17588

SEQ ID NO: 62413 - DNA, 43 bp, Homo Sapiens; identical to SEQ ID NO: 17586

SEQ ID NO: 62414 - DNA, 30 bp, Homo Sapiens; identical to SEQ ID NO: 17581

SEQ ID NO: 62415 - DNA, 33 bp, Homo Sapiens; identical to SEQ ID NO: 17570

SEQ ID NO: 62416 - DNA, 31 bp, Homo Sapiens; identical to SEQ ID NO: 17568

SEQ ID NO: 62417 - DNA, 26 bp, Homo Sapiens
gctcagtcggtagagcatgagaccct

SEQ ID NO: 62418 - DNA, 25 bp, Homo Sapiens
gctcagtcggtagagcatgagaccc

SEQ ID NO: 62419 - DNA, 35 bp, Homo Sapiens; identical to SEQ ID NO: 17526

SEQ ID NO: 62420 - DNA, 34 bp, Homo Sapiens; identical to SEQ ID NO: 17503

SEQ ID NO: 62421 - DNA, 33 bp, Homo Sapiens; identical to SEQ ID NO: 17502

SEQ ID NO: 62422 - DNA, 28 bp, Homo Sapiens
gctatcgggcccataccccgaaaatgtt

SEQ ID NO: 62423 - DNA, 22 bp, Homo Sapiens
gctaggattcggcgctttcacc

SEQ ID NO: 62424 - DNA, 30 bp, Homo Sapiens; identical to SEQ ID NO: 17443

SEQ ID NO: 62425 - DNA, 16 bp, Homo Sapiens
gctagctcagtcggta

SEQ ID NO: 62426 - DNA, 38 bp, Homo Sapiens; identical to SEQ ID NO: 17366

SEQ ID NO: 62427 - DNA, 48 bp, Homo Sapiens; identical to SEQ ID NO: 17348

SEQ ID NO: 62428 - DNA, 37 bp, Homo Sapiens; identical to SEQ ID NO: 17342

SEQ ID NO: 62429 - DNA, 24 bp, Homo Sapiens
gcgtgttcaaatcacgtcggggtc

SEQ ID NO: 62430 - DNA, 32 bp, Homo Sapiens; identical to SEQ ID NO: 17214

SEQ ID NO: 62431 - DNA, 41 bp, Homo Sapiens; identical to SEQ ID NO: 17169

SEQ ID NO: 62432 - DNA, 47 bp, Homo Sapiens; identical to SEQ ID NO: 17155

SEQ ID NO: 62433 - DNA, 32 bp, Homo Sapiens; identical to SEQ ID NO: 17143

SEQ ID NO: 62434 - DNA, 30 bp, Homo Sapiens; identical to SEQ ID NO: 17141

SEQ ID NO: 62435 - DNA, 29 bp, Homo Sapiens
gcgatccgagttcaaatctcggtggaacc

SEQ ID NO: 62436 - DNA, 28 bp, Homo Sapiens
gcgatccgagttcaaatctcggtggaac

SEQ ID NO: 62437 - DNA, 35 bp, Homo Sapiens; identical to SEQ ID NO: 17064

SEQ ID NO: 62438 - DNA, 34 bp, Homo Sapiens; identical to SEQ ID NO: 17050

SEQ ID NO: 62439 - DNA, 42 bp, Homo Sapiens; identical to SEQ ID NO: 17025

SEQ ID NO: 62440 - DNA, 48 bp, Homo Sapiens; identical to SEQ ID NO: 16967

SEQ ID NO: 62441 - DNA, 42 bp, Homo Sapiens; identical to SEQ ID NO: 16963

SEQ ID NO: 62442 - DNA, 48 bp, Homo Sapiens; identical to SEQ ID NO: 16935

SEQ ID NO: 62443 - DNA, 37 bp, Homo Sapiens; identical to SEQ ID NO: 16932

SEQ ID NO: 62444 - DNA, 20 bp, Homo Sapiens
gccgcagcaacctcggttcg

SEQ ID NO: 62445 - DNA, 30 bp, Homo Sapiens; identical to SEQ ID NO: 16867

SEQ ID NO: 62446 - DNA, 17 bp, Homo Sapiens
gccccgggttcgatccc

SEQ ID NO: 62447 - DNA, 34 bp, Homo Sapiens; identical to SEQ ID NO: 16749

SEQ ID NO: 62448 - DNA, 38 bp, Homo Sapiens; identical to SEQ ID NO: 16733

SEQ ID NO: 62449 - DNA, 25 bp, Homo Sapiens
gcccataacccagaggtcgatggat

SEQ ID NO: 62450 - DNA, 28 bp, Homo Sapiens
gccatgatcgtatagtggttagtactct

SEQ ID NO: 62451 - DNA, 30 bp, Homo Sapiens; identical to SEQ ID NO: 16696

SEQ ID NO: 62452 - DNA, 35 bp, Homo Sapiens; identical to SEQ ID NO: 16692

SEQ ID NO: 62453 - DNA, 40 bp, Homo Sapiens; identical to SEQ ID NO: 16679

SEQ ID NO: 62454 - DNA, 37 bp, Homo Sapiens; identical to SEQ ID NO: 16678

SEQ ID NO: 62455 - DNA, 36 bp, Homo Sapiens; identical to SEQ ID NO: 16666

SEQ ID NO: 62456 - DNA, 48 bp, Homo Sapiens; identical to SEQ ID NO: 16655

SEQ ID NO: 62457 - DNA, 41 bp, Homo Sapiens; identical to SEQ ID NO: 16602

SEQ ID NO: 62458 - DNA, 48 bp, Homo Sapiens; identical to SEQ ID NO: 16576

SEQ ID NO: 62459 - DNA, 22 bp, Homo Sapiens
gcagcttcaaacctgccggggc

SEQ ID NO: 62460 - DNA, 48 bp, Homo Sapiens; identical to SEQ ID NO: 16444

SEQ ID NO: 62461 - DNA, 28 bp, Homo Sapiens
gcagaaggtcctgggttcgagccccagt

SEQ ID NO: 62462 - DNA, 37 bp, Homo Sapiens; identical to SEQ ID NO: 16382

SEQ ID NO: 62463 - DNA, 37 bp, Homo Sapiens; identical to SEQ ID NO: 16346

SEQ ID NO: 62464 - DNA, 31 bp, Homo Sapiens; identical to SEQ ID NO: 16312

SEQ ID NO: 62465 - DNA, 39 bp, Homo Sapiens; identical to SEQ ID NO: 16292

SEQ ID NO: 62466 - DNA, 26 bp, Homo Sapiens
gatttcgactcattaaattatgataa

SEQ ID NO: 62467 - DNA, 31 bp, Homo Sapiens; identical to SEQ ID NO: 16238

SEQ ID NO: 62468 - DNA, 34 bp, Homo Sapiens; identical to SEQ ID NO: 16184

SEQ ID NO: 62469 - DNA, 38 bp, Homo Sapiens; identical to SEQ ID NO: 16176

SEQ ID NO: 62470 - DNA, 19 bp, Homo Sapiens
gattcccgggcggcgcacc

SEQ ID NO: 62471 - DNA, 46 bp, Homo Sapiens; identical to SEQ ID NO: 16117

SEQ ID NO: 62472 - DNA, 25 bp, Homo Sapiens
gattaagagaaccaacacctcttta

SEQ ID NO: 62473 - DNA, 39 bp, Homo Sapiens; identical to SEQ ID NO: 16062

SEQ ID NO: 62474 - DNA, 28 bp, Homo Sapiens
gatgggttcgattctcatagtcctagcc

SEQ ID NO: 62475 - DNA, 28 bp, Homo Sapiens
gatggcagagcccggtaatcgcataaaa

SEQ ID NO: 62476 - DNA, 26 bp, Homo Sapiens
gatggcagagcccggtaatcgcataa

SEQ ID NO: 62477 - DNA, 16 bp, Homo Sapiens
gatccttaggtcgctg

SEQ ID NO: 62478 - DNA, 19 bp, Homo Sapiens
gatccgagttcgagtctcg

SEQ ID NO: 62479 - DNA, 37 bp, Homo Sapiens; identical to SEQ ID NO: 15920

SEQ ID NO: 62480 - DNA, 20 bp, Homo Sapiens
gataaaagagttactttgat

SEQ ID NO: 62481 - DNA, 32 bp, Homo Sapiens; identical to SEQ ID NO: 15801

SEQ ID NO: 62482 - DNA, 23 bp, Homo Sapiens
gagtggtctaaggcgccagactc

SEQ ID NO: 62483 - DNA, 33 bp, Homo Sapiens; identical to SEQ ID NO: 15757

SEQ ID NO: 62484 - DNA, 23 bp, Homo Sapiens
gagtaaataataggagcttaaac

SEQ ID NO: 62485 - DNA, 27 bp, Homo Sapiens
gaggcgtgggttcgaatcccacttctg

SEQ ID NO: 62486 - DNA, 21 bp, Homo Sapiens
gagcatgggactcttaatctc

SEQ ID NO: 62487 - DNA, 20 bp, Homo Sapiens
gagcatgggactcttaatcc

SEQ ID NO: 62488 - DNA, 34 bp, Homo Sapiens; identical to SEQ ID NO: 15596

SEQ ID NO: 62489 - DNA, 25 bp, Homo Sapiens
gagatgaaaacctttttccaaggac

SEQ ID NO: 62490 - DNA, 35 bp, Homo Sapiens; identical to SEQ ID NO: 15529

SEQ ID NO: 62491 - DNA, 24 bp, Homo Sapiens
gagaatagtttaaattagaatctt

SEQ ID NO: 62492 - DNA, 48 bp, Homo Sapiens; identical to SEQ ID NO: 15503

SEQ ID NO: 62493 - DNA, 19 bp, Homo Sapiens
gacttttaaaggataacag

SEQ ID NO: 62494 - DNA, 45 bp, Homo Sapiens; identical to SEQ ID NO: 15466

SEQ ID NO: 62495 - DNA, 45 bp, Homo Sapiens; identical to SEQ ID NO: 15432

SEQ ID NO: 62496 - DNA, 46 bp, Homo Sapiens; identical to SEQ ID NO: 15428

SEQ ID NO: 62497 - DNA, 43 bp, Homo Sapiens; identical to SEQ ID NO: 15425

SEQ ID NO: 62498 - DNA, 40 bp, Homo Sapiens; identical to SEQ ID NO: 15423

SEQ ID NO: 62499 - DNA, 44 bp, Homo Sapiens; identical to SEQ ID NO: 15269

SEQ ID NO: 62500 - DNA, 26 bp, Homo Sapiens
gaattgcaaattcgaagaagcagctt

SEQ ID NO: 62501 - DNA, 31 bp, Homo Sapiens; identical to SEQ ID NO: 15255

SEQ ID NO: 62502 - DNA, 33 bp, Homo Sapiens; identical to SEQ ID NO: 15167

SEQ ID NO: 62503 - DNA, 29 bp, Homo Sapiens
gaaggctgcgtgttcgaatcacgtcgggg

SEQ ID NO: 62504 - DNA, 37 bp, Homo Sapiens; identical to SEQ ID NO: 15128

SEQ ID NO: 62505 - DNA, 48 bp, Homo Sapiens; identical to SEQ ID NO: 15008

SEQ ID NO: 62506 - DNA, 23 bp, Homo Sapiens
gaaaggtccccggttcgaaaccg

SEQ ID NO: 62507 - DNA, 48 bp, Homo Sapiens; identical to SEQ ID NO: 14981

SEQ ID NO: 62508 - DNA, 37 bp, Homo Sapiens; identical to SEQ ID NO: 14883

SEQ ID NO: 62509 - DNA, 31 bp, Homo Sapiens; identical to SEQ ID NO: 14878

SEQ ID NO: 62510 - DNA, 30 bp, Homo Sapiens; identical to SEQ ID NO: 14857

SEQ ID NO: 62511 - DNA, 44 bp, Homo Sapiens; identical to SEQ ID NO: 14846

SEQ ID NO: 62512 - DNA, 41 bp, Homo Sapiens; identical to SEQ ID NO: 14844

SEQ ID NO: 62513 - DNA, 16 bp, Homo Sapiens
cttttaagttaaagat

SEQ ID NO: 62514 - DNA, 43 bp, Homo Sapiens; identical to SEQ ID NO: 14819

SEQ ID NO: 62515 - DNA, 39 bp, Homo Sapiens; identical to SEQ ID NO: 14817

SEQ ID NO: 62516 - DNA, 36 bp, Homo Sapiens; identical to SEQ ID NO: 14815

SEQ ID NO: 62517 - DNA, 32 bp, Homo Sapiens; identical to SEQ ID NO: 14773

SEQ ID NO: 62518 - DNA, 37 bp, Homo Sapiens; identical to SEQ ID NO: 14763

SEQ ID NO: 62519 - DNA, 33 bp, Homo Sapiens; identical to SEQ ID NO: 14752

SEQ ID NO: 62520 - DNA, 19 bp, Homo Sapiens
ctttgaatccagcaatccg

SEQ ID NO: 62521 - DNA, 20 bp, Homo Sapiens
ctttcaccgccgcggcccgg

SEQ ID NO: 62522 - DNA, 32 bp, Homo Sapiens; identical to SEQ ID NO: 14659

SEQ ID NO: 62523 - DNA, 34 bp, Homo Sapiens; identical to SEQ ID NO: 14626

SEQ ID NO: 62524 - DNA, 31 bp, Homo Sapiens; identical to SEQ ID NO: 14584

SEQ ID NO: 62525 - DNA, 20 bp, Homo Sapiens
cttaggagatttcaacttaa

SEQ ID NO: 62526 - DNA, 45 bp, Homo Sapiens; identical to SEQ ID NO: 14565

SEQ ID NO: 62527 - DNA, 30 bp, Homo Sapiens; identical to SEQ ID NO: 14556

SEQ ID NO: 62528 - DNA, 48 bp, Homo Sapiens; identical to SEQ ID NO: 14547

SEQ ID NO: 62529 - DNA, 31 bp, Homo Sapiens; identical to SEQ ID NO: 14541

SEQ ID NO: 62530 - DNA, 38 bp, Homo Sapiens; identical to SEQ ID NO: 14534

SEQ ID NO: 62531 - DNA, 27 bp, Homo Sapiens
cttacctcctcaaagcaatacactgaa

SEQ ID NO: 62532 - DNA, 38 bp, Homo Sapiens; identical to SEQ ID NO: 14505

SEQ ID NO: 62533 - DNA, 37 bp, Homo Sapiens; identical to SEQ ID NO: 14504

SEQ ID NO: 62534 - DNA, 33 bp, Homo Sapiens; identical to SEQ ID NO: 14500

SEQ ID NO: 62535 - DNA, 22 bp, Homo Sapiens
cttaattaaagtggctgatttg

SEQ ID NO: 62536 - DNA, 19 bp, Homo Sapiens
cttaattaaagtggctgat

SEQ ID NO: 62537 - DNA, 16 bp, Homo Sapiens
cttaatctcagggtcg

SEQ ID NO: 62538 - DNA, 21 bp, Homo Sapiens
cttaagatccaatggacatat

SEQ ID NO: 62539 - DNA, 25 bp, Homo Sapiens
cttaacacaaagcacccaacttaca

SEQ ID NO: 62540 - DNA, 40 bp, Homo Sapiens; identical to SEQ ID NO: 14396

SEQ ID NO: 62541 - DNA, 35 bp, Homo Sapiens; identical to SEQ ID NO: 14393

SEQ ID NO: 62542 - DNA, 32 bp, Homo Sapiens; identical to SEQ ID NO: 14392

SEQ ID NO: 62543 - DNA, 35 bp, Homo Sapiens; identical to SEQ ID NO: 14359

SEQ ID NO: 62544 - DNA, 32 bp, Homo Sapiens; identical to SEQ ID NO: 14352

SEQ ID NO: 62545 - DNA, 31 bp, Homo Sapiens; identical to SEQ ID NO: 14340

SEQ ID NO: 62546 - DNA, 37 bp, Homo Sapiens; identical to SEQ ID NO: 14327

SEQ ID NO: 62547 - DNA, 17 bp, Homo Sapiens
ctggttcgattccggct

SEQ ID NO: 62548 - DNA, 34 bp, Homo Sapiens; identical to SEQ ID NO: 14221

SEQ ID NO: 62549 - DNA, 29 bp, Homo Sapiens
ctgggcccataacccagaggtcgatggat

SEQ ID NO: 62550 - DNA, 27 bp, Homo Sapiens
ctggatagctcagtcggtagagcatca

SEQ ID NO: 62551 - DNA, 47 bp, Homo Sapiens; identical to SEQ ID NO: 14187

SEQ ID NO: 62552 - DNA, 40 bp, Homo Sapiens; identical to SEQ ID NO: 14183

SEQ ID NO: 62553 - DNA, 37 bp, Homo Sapiens; identical to SEQ ID NO: 14152

SEQ ID NO: 62554 - DNA, 41 bp, Homo Sapiens; identical to SEQ ID NO: 14045

SEQ ID NO: 62555 - DNA, 40 bp, Homo Sapiens; identical to SEQ ID NO: 14044

SEQ ID NO: 62556 - DNA, 25 bp, Homo Sapiens
ctgaatccagcgatccgagttcgag

SEQ ID NO: 62557 - DNA, 39 bp, Homo Sapiens; identical to SEQ ID NO: 14035

SEQ ID NO: 62558 - DNA, 26 bp, Homo Sapiens
ctgaatccagcgatccgagttcaaat

SEQ ID NO: 62559 - DNA, 31 bp, Homo Sapiens; identical to SEQ ID NO: 14000

SEQ ID NO: 62560 - DNA, 24 bp, Homo Sapiens
ctgaaggtcctgagttcgaacctc

SEQ ID NO: 62561 - DNA, 48 bp, Homo Sapiens; identical to SEQ ID NO: 13921

SEQ ID NO: 62562 - DNA, 35 bp, Homo Sapiens; identical to SEQ ID NO: 13899

SEQ ID NO: 62563 - DNA, 41 bp, Homo Sapiens; identical to SEQ ID NO: 13897

SEQ ID NO: 62564 - DNA, 29 bp, Homo Sapiens
ctcctcgttagtatagtggtgagtatccc

SEQ ID NO: 62565 - DNA, 38 bp, Homo Sapiens; identical to SEQ ID NO: 13778

SEQ ID NO: 62566 - DNA, 48 bp, Homo Sapiens; identical to SEQ ID NO: 13764

SEQ ID NO: 62567 - DNA, 35 bp, Homo Sapiens; identical to SEQ ID NO: 13753

SEQ ID NO: 62568 - DNA, 29 bp, Homo Sapiens
ctccctggtggtctagtggttaggattcg

SEQ ID NO: 62569 - DNA, 30 bp, Homo Sapiens; identical to SEQ ID NO: 13669

SEQ ID NO: 62570 - DNA, 44 bp, Homo Sapiens; identical to SEQ ID NO: 13630

SEQ ID NO: 62571 - DNA, 25 bp, Homo Sapiens
ctcataatctgaaggtcctgagttc

SEQ ID NO: 62572 - DNA, 24 bp, Homo Sapiens
ctcagtcggtagagcatgagaccc

SEQ ID NO: 62573 - DNA, 23 bp, Homo Sapiens
ctcagtcggtagagcatgagacc

SEQ ID NO: 62574 - DNA, 25 bp, Homo Sapiens
ctcagtaagttgcaatacttaattt

SEQ ID NO: 62575 - DNA, 18 bp, Homo Sapiens
ctcagggatgggttcgat

SEQ ID NO: 62576 - DNA, 42 bp, Homo Sapiens; identical to SEQ ID NO: 13423

SEQ ID NO: 62577 - DNA, 33 bp, Homo Sapiens; identical to SEQ ID NO: 13416

SEQ ID NO: 62578 - DNA, 32 bp, Homo Sapiens; identical to SEQ ID NO: 13415

SEQ ID NO: 62579 - DNA, 27 bp, Homo Sapiens
ctatcgggcccataccccgaaaatgtt

SEQ ID NO: 62580 - DNA, 23 bp, Homo Sapiens
ctatcgggcccataccccgaaaa

SEQ ID NO: 62581 - DNA, 20 bp, Homo Sapiens
ctatcgggcccataccccga

SEQ ID NO: 62582 - DNA, 33 bp, Homo Sapiens; identical to SEQ ID NO: 13395

SEQ ID NO: 62583 - DNA, 44 bp, Homo Sapiens; identical to SEQ ID NO: 13369

SEQ ID NO: 62584 - DNA, 48 bp, Homo Sapiens; identical to SEQ ID NO: 13308

SEQ ID NO: 62585 - DNA, 46 bp, Homo Sapiens; identical to SEQ ID NO: 13296

SEQ ID NO: 62586 - DNA, 29 bp, Homo Sapiens
ctagctcagtcggtagagcatgagaccct

SEQ ID NO: 62587 - DNA, 32 bp, Homo Sapiens; identical to SEQ ID NO: 13255

SEQ ID NO: 62588 - DNA, 26 bp, Homo Sapiens
ctaatggtggagttaaagactttttc

SEQ ID NO: 62589 - DNA, 28 bp, Homo Sapiens
ctaagtgtttgtgggtttaagtcccatt

SEQ ID NO: 62590 - DNA, 39 bp, Homo Sapiens; identical to SEQ ID NO: 13185

SEQ ID NO: 62591 - DNA, 32 bp, Homo Sapiens; identical to SEQ ID NO: 13120

SEQ ID NO: 62592 - DNA, 32 bp, Homo Sapiens; identical to SEQ ID NO: 13093

SEQ ID NO: 62593 - DNA, 28 bp, Homo Sapiens
ctaaagacaggggttaggcctcttttta

SEQ ID NO: 62594 - DNA, 25 bp, Homo Sapiens
ctaaagacaggggttaggcctcttt

SEQ ID NO: 62595 - DNA, 33 bp, Homo Sapiens; identical to SEQ ID NO: 13075

SEQ ID NO: 62596 - DNA, 32 bp, Homo Sapiens; identical to SEQ ID NO: 13063

SEQ ID NO: 62597 - DNA, 32 bp, Homo Sapiens; identical to SEQ ID NO: 13005

SEQ ID NO: 62598 - DNA, 28 bp, Homo Sapiens
cgttaacttccaattaactagttttgac

SEQ ID NO: 62599 - DNA, 38 bp, Homo Sapiens; identical to SEQ ID NO: 12936

SEQ ID NO: 62600 - DNA, 17 bp, Homo Sapiens
cgtcaggatggccgagc

SEQ ID NO: 62601 - DNA, 37 bp, Homo Sapiens; identical to SEQ ID NO: 12903

SEQ ID NO: 62602 - DNA, 20 bp, Homo Sapiens
cgtagtgtagcggttatcac

SEQ ID NO: 62603 - DNA, 20 bp, Homo Sapiens
cggttcgaaaccgggcggaa

SEQ ID NO: 62604 - DNA, 34 bp, Homo Sapiens; identical to SEQ ID NO: 12822

SEQ ID NO: 62605 - DNA, 17 bp, Homo Sapiens
cggtagagcatttgact

SEQ ID NO: 62606 - DNA, 35 bp, Homo Sapiens; identical to SEQ ID NO: 12750

SEQ ID NO: 62607 - DNA, 17 bp, Homo Sapiens
cggtagagcatgagacc

SEQ ID NO: 62608 - DNA, 27 bp, Homo Sapiens
cggggttcaattccccgacggggagcc

SEQ ID NO: 62609 - DNA, 43 bp, Homo Sapiens; identical to SEQ ID NO: 12604

SEQ ID NO: 62610 - DNA, 32 bp, Homo Sapiens; identical to SEQ ID NO: 12597

SEQ ID NO: 62611 - DNA, 28 bp, Homo Sapiens
cgggcccataccccgaaaatgttggtta

SEQ ID NO: 62612 - DNA, 27 bp, Homo Sapiens
cgggcccataccccgaaaatgttggtt

SEQ ID NO: 62613 - DNA, 25 bp, Homo Sapiens
cgggcccataccccgaaaatgttgg

SEQ ID NO: 62614 - DNA, 18 bp, Homo Sapiens
cgggcccataccccgaaa

SEQ ID NO: 62615 - DNA, 36 bp, Homo Sapiens; identical to SEQ ID NO: 12578

SEQ ID NO: 62616 - DNA, 48 bp, Homo Sapiens; identical to SEQ ID NO: 12483

SEQ ID NO: 62617 - DNA, 23 bp, Homo Sapiens
cggcccgggttcgactcccggtg

SEQ ID NO: 62618 - DNA, 48 bp, Homo Sapiens; identical to SEQ ID NO: 12371

SEQ ID NO: 62619 - DNA, 29 bp, Homo Sapiens
cggaagcgtgctgggcccataacccagag

SEQ ID NO: 62620 - DNA, 29 bp, Homo Sapiens
cgctggttcgattccagctcgaaggacca

SEQ ID NO: 62621 - DNA, 45 bp, Homo Sapiens; identical to SEQ ID NO: 12307

SEQ ID NO: 62622 - DNA, 29 bp, Homo Sapiens
cgcgtgggttcgaaccccacttctggtac

SEQ ID NO: 62623 - DNA, 22 bp, Homo Sapiens
cgcgtcagtctcataatctgaa

SEQ ID NO: 62624 - DNA, 17 bp, Homo Sapiens
cgcgggttcgaaccccg

SEQ ID NO: 62625 - DNA, 38 bp, Homo Sapiens; identical to SEQ ID NO: 12252

SEQ ID NO: 62626 - DNA, 32 bp, Homo Sapiens; identical to SEQ ID NO: 12248

SEQ ID NO: 62627 - DNA, 31 bp, Homo Sapiens; identical to SEQ ID NO: 12247

SEQ ID NO: 62628 - DNA, 29 bp, Homo Sapiens
cgcgggagaccggggttcaattccccgac

SEQ ID NO: 62629 - DNA, 26 bp, Homo Sapiens
cgcgggagaccggggttcaattcccc

SEQ ID NO: 62630 - DNA, 28 bp, Homo Sapiens
cgcgagttcaattctcgctggggcctcc

SEQ ID NO: 62631 - DNA, 36 bp, Homo Sapiens; identical to SEQ ID NO: 12156

SEQ ID NO: 62632 - DNA, 48 bp, Homo Sapiens; identical to SEQ ID NO: 12102

SEQ ID NO: 62633 - DNA, 38 bp, Homo Sapiens; identical to SEQ ID NO: 12098

SEQ ID NO: 62634 - DNA, 27 bp, Homo Sapiens
cgccgcggcccgggttcgattcccggc

SEQ ID NO: 62635 - DNA, 30 bp, Homo Sapiens; identical to SEQ ID NO: 12052

SEQ ID NO: 62636 - DNA, 32 bp, Homo Sapiens; identical to SEQ ID NO: 12032

SEQ ID NO: 62637 - DNA, 19 bp, Homo Sapiens
cgcattggtggttcagtgg

SEQ ID NO: 62638 - DNA, 35 bp, Homo Sapiens; identical to SEQ ID NO: 12001

SEQ ID NO: 62639 - DNA, 34 bp, Homo Sapiens; identical to SEQ ID NO: 12000

SEQ ID NO: 62640 - DNA, 32 bp, Homo Sapiens; identical to SEQ ID NO: 11993

SEQ ID NO: 62641 - DNA, 28 bp, Homo Sapiens
cgcataaaacttaaaactttacagtcag

SEQ ID NO: 62642 - DNA, 23 bp, Homo Sapiens
cgcataaaacttaaaactttaca

SEQ ID NO: 62643 - DNA, 16 bp, Homo Sapiens
cgattcccggccaacg

SEQ ID NO: 62644 - DNA, 48 bp, Homo Sapiens; identical to SEQ ID NO: 11909

SEQ ID NO: 62645 - DNA, 37 bp, Homo Sapiens; identical to SEQ ID NO: 11904

SEQ ID NO: 62646 - DNA, 26 bp, Homo Sapiens
cgatggtttttcatatcattggtcgt

SEQ ID NO: 62647 - DNA, 23 bp, Homo Sapiens
cgatccgagttcaaatctcggtg

SEQ ID NO: 62648 - DNA, 25 bp, Homo Sapiens
cgaggtgattttcatattgaattgc

SEQ ID NO: 62649 - DNA, 16 bp, Homo Sapiens
cgactcccggtgtggg

SEQ ID NO: 62650 - DNA, 34 bp, Homo Sapiens; identical to SEQ ID NO: 11753

SEQ ID NO: 62651 - DNA, 23 bp, Homo Sapiens
cgaatgatttcgactcattaaat

SEQ ID NO: 62652 - DNA, 37 bp, Homo Sapiens; identical to SEQ ID NO: 11661

SEQ ID NO: 62653 - DNA, 18 bp, Homo Sapiens
cgaaaaagtcatggaggc

SEQ ID NO: 62654 - DNA, 48 bp, Homo Sapiens; identical to SEQ ID NO: 11606

SEQ ID NO: 62655 - DNA, 41 bp, Homo Sapiens; identical to SEQ ID NO: 11549

SEQ ID NO: 62656 - DNA, 32 bp, Homo Sapiens; identical to SEQ ID NO: 11544

SEQ ID NO: 62657 - DNA, 19 bp, Homo Sapiens
cctggtggtctagtggcta

SEQ ID NO: 62658 - DNA, 40 bp, Homo Sapiens; identical to SEQ ID NO: 11417

SEQ ID NO: 62659 - DNA, 23 bp, Homo Sapiens
cctcctcaaagcaatacactgaa

SEQ ID NO: 62660 - DNA, 32 bp, Homo Sapiens; identical to SEQ ID NO: 11353

SEQ ID NO: 62661 - DNA, 48 bp, Homo Sapiens; identical to SEQ ID NO: 11342

SEQ ID NO: 62662 - DNA, 30 bp, Homo Sapiens; identical to SEQ ID NO: 11337

SEQ ID NO: 62663 - DNA, 32 bp, Homo Sapiens; identical to SEQ ID NO: 11333

SEQ ID NO: 62664 - DNA, 29 bp, Homo Sapiens
ccgtagtggagtggttatcacgttcgcct

SEQ ID NO: 62665 - DNA, 23 bp, Homo Sapiens
ccggttcgatcccgggcggaaac

SEQ ID NO: 62666 - DNA, 18 bp, Homo Sapiens
ccggttcgaaaccgggcg

SEQ ID NO: 62667 - DNA, 26 bp, Homo Sapiens
ccgggttcgattcccgggcggcgcac

SEQ ID NO: 62668 - DNA, 16 bp, Homo Sapiens
ccggggttcgattccc

SEQ ID NO: 62669 - DNA, 21 bp, Homo Sapiens
ccggagatgaaaacctttttc

SEQ ID NO: 62670 - DNA, 19 bp, Homo Sapiens
ccggagatgaaaacctttt

SEQ ID NO: 62671 - DNA, 43 bp, Homo Sapiens; identical to SEQ ID NO: 11022

SEQ ID NO: 62672 - DNA, 37 bp, Homo Sapiens; identical to SEQ ID NO: 10936

SEQ ID NO: 62673 - DNA, 31 bp, Homo Sapiens; identical to SEQ ID NO: 10931

SEQ ID NO: 62674 - DNA, 37 bp, Homo Sapiens; identical to SEQ ID NO: 10835

SEQ ID NO: 62675 - DNA, 31 bp, Homo Sapiens; identical to SEQ ID NO: 10815

SEQ ID NO: 62676 - DNA, 48 bp, Homo Sapiens; identical to SEQ ID NO: 10739

SEQ ID NO: 62677 - DNA, 40 bp, Homo Sapiens; identical to SEQ ID NO: 10736

SEQ ID NO: 62678 - DNA, 34 bp, Homo Sapiens; identical to SEQ ID NO: 10727

SEQ ID NO: 62679 - DNA, 33 bp, Homo Sapiens; identical to SEQ ID NO: 10726

SEQ ID NO: 62680 - DNA, 32 bp, Homo Sapiens; identical to SEQ ID NO: 10725

SEQ ID NO: 62681 - DNA, 16 bp, Homo Sapiens
cccggccagggaacca

SEQ ID NO: 62682 - DNA, 32 bp, Homo Sapiens; identical to SEQ ID NO: 10687

SEQ ID NO: 62683 - DNA, 32 bp, Homo Sapiens; identical to SEQ ID NO: 10683

SEQ ID NO: 62684 - DNA, 48 bp, Homo Sapiens; identical to SEQ ID NO: 10680

SEQ ID NO: 62685 - DNA, 25 bp, Homo Sapiens
cccgaaaatgttggttatacccttc

SEQ ID NO: 62686 - DNA, 16 bp, Homo Sapiens
ccccgggttcaatccc

SEQ ID NO: 62687 - DNA, 34 bp, Homo Sapiens; identical to SEQ ID NO: 10619

SEQ ID NO: 62688 - DNA, 25 bp, Homo Sapiens
ccccgcgcaggttcgaatcctgccg

SEQ ID NO: 62689 - DNA, 37 bp, Homo Sapiens; identical to SEQ ID NO: 10539

SEQ ID NO: 62690 - DNA, 27 bp, Homo Sapiens
cccattcttgcgacccgggttcgattc

SEQ ID NO: 62691 - DNA, 39 bp, Homo Sapiens; identical to SEQ ID NO: 10469

SEQ ID NO: 62692 - DNA, 19 bp, Homo Sapiens
cccataccccgaaaatgtt

SEQ ID NO: 62693 - DNA, 35 bp, Homo Sapiens; identical to SEQ ID NO: 10430

SEQ ID NO: 62694 - DNA, 29 bp, Homo Sapiens
cccaggcggcccgggttcgactcccggtg

SEQ ID NO: 62695 - DNA, 42 bp, Homo Sapiens; identical to SEQ ID NO: 10395

SEQ ID NO: 62696 - DNA, 48 bp, Homo Sapiens; identical to SEQ ID NO: 10367

SEQ ID NO: 62697 - DNA, 42 bp, Homo Sapiens; identical to SEQ ID NO: 10361

SEQ ID NO: 62698 - DNA, 37 bp, Homo Sapiens; identical to SEQ ID NO: 10338

SEQ ID NO: 62699 - DNA, 18 bp, Homo Sapiens
ccatttcataactttgtc

SEQ ID NO: 62700 - DNA, 39 bp, Homo Sapiens; identical to SEQ ID NO: 10310

SEQ ID NO: 62701 - DNA, 25 bp, Homo Sapiens
ccagttgattagggtgcttagctgt

SEQ ID NO: 62702 - DNA, 26 bp, Homo Sapiens
ccagggttcaagtccctgttcaggcg

SEQ ID NO: 62703 - DNA, 25 bp, Homo Sapiens
ccagggttcaagtccctgttcaggc

SEQ ID NO: 62704 - DNA, 34 bp, Homo Sapiens; identical to SEQ ID NO: 10140

SEQ ID NO: 62705 - DNA, 17 bp, Homo Sapiens
ccagagtgtagcttaac

SEQ ID NO: 62706 - DNA, 48 bp, Homo Sapiens; identical to SEQ ID NO: 10037

SEQ ID NO: 62707 - DNA, 46 bp, Homo Sapiens; identical to SEQ ID NO: 10036

SEQ ID NO: 62708 - DNA, 32 bp, Homo Sapiens; identical to SEQ ID NO: 10031

SEQ ID NO: 62709 - DNA, 33 bp, Homo Sapiens; identical to SEQ ID NO: 9964

SEQ ID NO: 62710 - DNA, 31 bp, Homo Sapiens; identical to SEQ ID NO: 9949

SEQ ID NO: 62711 - DNA, 31 bp, Homo Sapiens; identical to SEQ ID NO: 9943

SEQ ID NO: 62712 - DNA, 36 bp, Homo Sapiens; identical to SEQ ID NO: 9882

SEQ ID NO: 62713 - DNA, 36 bp, Homo Sapiens; identical to SEQ ID NO: 9862

SEQ ID NO: 62714 - DNA, 42 bp, Homo Sapiens; identical to SEQ ID NO: 9841

SEQ ID NO: 62715 - DNA, 37 bp, Homo Sapiens; identical to SEQ ID NO: 9836

SEQ ID NO: 62716 - DNA, 39 bp, Homo Sapiens; identical to SEQ ID NO: 9811

SEQ ID NO: 62717 - DNA, 32 bp, Homo Sapiens; identical to SEQ ID NO: 9799

SEQ ID NO: 62718 - DNA, 23 bp, Homo Sapiens
cattggtcttaggccccaaaaat

SEQ ID NO: 62719 - DNA, 32 bp, Homo Sapiens; identical to SEQ ID NO: 9722

SEQ ID NO: 62720 - DNA, 34 bp, Homo Sapiens; identical to SEQ ID NO: 9708

SEQ ID NO: 62721 - DNA, 33 bp, Homo Sapiens; identical to SEQ ID NO: 9684

SEQ ID NO: 62722 - DNA, 32 bp, Homo Sapiens; identical to SEQ ID NO: 9683

SEQ ID NO: 62723 - DNA, 29 bp, Homo Sapiens
cattaaattatgataatcatatttaccaa

SEQ ID NO: 62724 - DNA, 23 bp, Homo Sapiens
catgtctaacaacatggctttct

SEQ ID NO: 62725 - DNA, 22 bp, Homo Sapiens
catgtctaacaacatggctttc

SEQ ID NO: 62726 - DNA, 26 bp, Homo Sapiens
catggtgtaatggtgagcactctgga

SEQ ID NO: 62727 - DNA, 17 bp, Homo Sapiens
catgggactcttaatct

SEQ ID NO: 62728 - DNA, 31 bp, Homo Sapiens; identical to SEQ ID NO: 9580

SEQ ID NO: 62729 - DNA, 40 bp, Homo Sapiens; identical to SEQ ID NO: 9542

SEQ ID NO: 62730 - DNA, 38 bp, Homo Sapiens; identical to SEQ ID NO: 9540

SEQ ID NO: 62731 - DNA, 33 bp, Homo Sapiens; identical to SEQ ID NO: 9535

SEQ ID NO: 62732 - DNA, 29 bp, Homo Sapiens
catcagattgtgaatctgacaacagaggc

SEQ ID NO: 62733 - DNA, 33 bp, Homo Sapiens; identical to SEQ ID NO: 9511

SEQ ID NO: 62734 - DNA, 25 bp, Homo Sapiens
catagtgtagcggttatcacgtctg

SEQ ID NO: 62735 - DNA, 37 bp, Homo Sapiens; identical to SEQ ID NO: 9433

SEQ ID NO: 62736 - DNA, 29 bp, Homo Sapiens
cataatctgaaggtcgtgagttcgagcct

SEQ ID NO: 62737 - DNA, 32 bp, Homo Sapiens; identical to SEQ ID NO: 9396

SEQ ID NO: 62738 - DNA, 29 bp, Homo Sapiens
cataaaacttaaaactttacagtcagagg

SEQ ID NO: 62739 - DNA, 27 bp, Homo Sapiens
cataaaacttaaaactttacagtcaga

SEQ ID NO: 62740 - DNA, 31 bp, Homo Sapiens; identical to SEQ ID NO: 9340

SEQ ID NO: 62741 - DNA, 29 bp, Homo Sapiens
cagttgacccgggttcgattcccggccaa

SEQ ID NO: 62742 - DNA, 36 bp, Homo Sapiens; identical to SEQ ID NO: 9299

SEQ ID NO: 62743 - DNA, 25 bp, Homo Sapiens
cagtggcctaatggataaggcattg

SEQ ID NO: 62744 - DNA, 40 bp, Homo Sapiens; identical to SEQ ID NO: 9249

SEQ ID NO: 62745 - DNA, 24 bp, Homo Sapiens
cagtctcataatctgaaggtcgtg

SEQ ID NO: 62746 - DNA, 17 bp, Homo Sapiens
cagtctcataatctgaa

SEQ ID NO: 62747 - DNA, 21 bp, Homo Sapiens
cagtcggtggagcatgggact

SEQ ID NO: 62748 - DNA, 30 bp, Homo Sapiens; identical to SEQ ID NO: 9228

SEQ ID NO: 62749 - DNA, 41 bp, Homo Sapiens; identical to SEQ ID NO: 9223

SEQ ID NO: 62750 - DNA, 37 bp, Homo Sapiens; identical to SEQ ID NO: 9195

SEQ ID NO: 62751 - DNA, 30 bp, Homo Sapiens; identical to SEQ ID NO: 9182

SEQ ID NO: 62752 - DNA, 27 bp, Homo Sapiens
cagtcggtagagcatgagacccttaat

SEQ ID NO: 62753 - DNA, 26 bp, Homo Sapiens
cagtcggtagagcatgagacccttaa

SEQ ID NO: 62754 - DNA, 24 bp, Homo Sapiens
cagtcggtagagcatgagaccctt

SEQ ID NO: 62755 - DNA, 23 bp, Homo Sapiens
cagtcggtagagcatgagaccct

SEQ ID NO: 62756 - DNA, 21 bp, Homo Sapiens
cagtcggtagagcataagact

SEQ ID NO: 62757 - DNA, 27 bp, Homo Sapiens
caggtggcccgggttcgactcccggta

SEQ ID NO: 62758 - DNA, 21 bp, Homo Sapiens
cagggtcgtgggttcgagccc

SEQ ID NO: 62759 - DNA, 19 bp, Homo Sapiens
caggcggcccgggttcgac

SEQ ID NO: 62760 - DNA, 27 bp, Homo Sapiens
caggatggccgagtggtctaaggcgcc

SEQ ID NO: 62761 - DNA, 30 bp, Homo Sapiens; identical to SEQ ID NO: 8923

SEQ ID NO: 62762 - DNA, 18 bp, Homo Sapiens
cagcttcaaacctgccgg

SEQ ID NO: 62763 - DNA, 31 bp, Homo Sapiens; identical to SEQ ID NO: 8886

SEQ ID NO: 62764 - DNA, 38 bp, Homo Sapiens; identical to SEQ ID NO: 8860

SEQ ID NO: 62765 - DNA, 29 bp, Homo Sapiens
cagcggaagcgtgctgggcccataaccca

SEQ ID NO: 62766 - DNA, 23 bp, Homo Sapiens
cagcgatccgagttcaaatctcg

SEQ ID NO: 62767 - DNA, 33 bp, Homo Sapiens; identical to SEQ ID NO: 8819

SEQ ID NO: 62768 - DNA, 30 bp, Homo Sapiens; identical to SEQ ID NO: 8804

SEQ ID NO: 62769 - DNA, 48 bp, Homo Sapiens; identical to SEQ ID NO: 8801

SEQ ID NO: 62770 - DNA, 45 bp, Homo Sapiens; identical to SEQ ID NO: 8798

SEQ ID NO: 62771 - DNA, 44 bp, Homo Sapiens; identical to SEQ ID NO: 8797

SEQ ID NO: 62772 - DNA, 43 bp, Homo Sapiens; identical to SEQ ID NO: 8796

SEQ ID NO: 62773 - DNA, 41 bp, Homo Sapiens; identical to SEQ ID NO: 8794

SEQ ID NO: 62774 - DNA, 40 bp, Homo Sapiens; identical to SEQ ID NO: 8793

SEQ ID NO: 62775 - DNA, 38 bp, Homo Sapiens; identical to SEQ ID NO: 8791

SEQ ID NO: 62776 - DNA, 34 bp, Homo Sapiens; identical to SEQ ID NO: 8787

SEQ ID NO: 62777 - DNA, 27 bp, Homo Sapiens
cagattgtgaatctgacaacagaggct

SEQ ID NO: 62778 - DNA, 25 bp, Homo Sapiens
cagattgtgaatctgacaacagagg

SEQ ID NO: 62779 - DNA, 48 bp, Homo Sapiens; identical to SEQ ID NO: 8764

SEQ ID NO: 62780 - DNA, 18 bp, Homo Sapiens
cagaggcttacgacccct

SEQ ID NO: 62781 - DNA, 48 bp, Homo Sapiens; identical to SEQ ID NO: 8654

SEQ ID NO: 62782 - DNA, 37 bp, Homo Sapiens; identical to SEQ ID NO: 8558

SEQ ID NO: 62783 - DNA, 33 bp, Homo Sapiens; identical to SEQ ID NO: 8529

SEQ ID NO: 62784 - DNA, 29 bp, Homo Sapiens
cactctggactttgaatccagcgatccga

SEQ ID NO: 62785 - DNA, 36 bp, Homo Sapiens; identical to SEQ ID NO: 8433

SEQ ID NO: 62786 - DNA, 30 bp, Homo Sapiens; identical to SEQ ID NO: 8406

SEQ ID NO: 62787 - DNA, 35 bp, Homo Sapiens; identical to SEQ ID NO: 8391

SEQ ID NO: 62788 - DNA, 37 bp, Homo Sapiens; identical to SEQ ID NO: 8387

SEQ ID NO: 62789 - DNA, 16 bp, Homo Sapiens
cacgcgggagaccggg

SEQ ID NO: 62790 - DNA, 31 bp, Homo Sapiens; identical to SEQ ID NO: 8342

SEQ ID NO: 62791 - DNA, 31 bp, Homo Sapiens; identical to SEQ ID NO: 8322

SEQ ID NO: 62792 - DNA, 30 bp, Homo Sapiens; identical to SEQ ID NO: 8321

SEQ ID NO: 62793 - DNA, 31 bp, Homo Sapiens; identical to SEQ ID NO: 8301

SEQ ID NO: 62794 - DNA, 48 bp, Homo Sapiens; identical to SEQ ID NO: 8259

SEQ ID NO: 62795 - DNA, 33 bp, Homo Sapiens; identical to SEQ ID NO: 8249

SEQ ID NO: 62796 - DNA, 31 bp, Homo Sapiens; identical to SEQ ID NO: 8247

SEQ ID NO: 62797 - DNA, 47 bp, Homo Sapiens; identical to SEQ ID NO: 8235

SEQ ID NO: 62798 - DNA, 46 bp, Homo Sapiens; identical to SEQ ID NO: 8234

SEQ ID NO: 62799 - DNA, 32 bp, Homo Sapiens; identical to SEQ ID NO: 8204

SEQ ID NO: 62800 - DNA, 20 bp, Homo Sapiens
caattcctcttcttaacacc

SEQ ID NO: 62801 - DNA, 20 bp, Homo Sapiens
caattaactagttttgacaa

SEQ ID NO: 62802 - DNA, 18 bp, Homo Sapiens
caattaactagttttgac

SEQ ID NO: 62803 - DNA, 33 bp, Homo Sapiens; identical to SEQ ID NO: 8120

SEQ ID NO: 62804 - DNA, 25 bp, Homo Sapiens
caatacactgaaaatgtttagacgg

SEQ ID NO: 62805 - DNA, 34 bp, Homo Sapiens; identical to SEQ ID NO: 8039

SEQ ID NO: 62806 - DNA, 36 bp, Homo Sapiens; identical to SEQ ID NO: 8028

SEQ ID NO: 62807 - DNA, 35 bp, Homo Sapiens; identical to SEQ ID NO: 8027

SEQ ID NO: 62808 - DNA, 28 bp, Homo Sapiens
caagcagttgacccgggttcgattcccg

SEQ ID NO: 62809 - DNA, 38 bp, Homo Sapiens; identical to SEQ ID NO: 7987

SEQ ID NO: 62810 - DNA, 48 bp, Homo Sapiens; identical to SEQ ID NO: 7916

SEQ ID NO: 62811 - DNA, 39 bp, Homo Sapiens; identical to SEQ ID NO: 7866

SEQ ID NO: 62812 - DNA, 20 bp, Homo Sapiens
caaattcgaagaagcagctt

SEQ ID NO: 62813 - DNA, 38 bp, Homo Sapiens; identical to SEQ ID NO: 7804

SEQ ID NO: 62814 - DNA, 35 bp, Homo Sapiens; identical to SEQ ID NO: 7801

SEQ ID NO: 62815 - DNA, 34 bp, Homo Sapiens; identical to SEQ ID NO: 7777

SEQ ID NO: 62816 - DNA, 32 bp, Homo Sapiens; identical to SEQ ID NO: 7775

SEQ ID NO: 62817 - DNA, 48 bp, Homo Sapiens; identical to SEQ ID NO: 7748

SEQ ID NO: 62818 - DNA, 17 bp, Homo Sapiens
caaaaattttggtgcaa

SEQ ID NO: 62819 - DNA, 28 bp, Homo Sapiens
attttggtgcaactccaaataaaagtac

SEQ ID NO: 62820 - DNA, 44 bp, Homo Sapiens; identical to SEQ ID NO: 7693

SEQ ID NO: 62821 - DNA, 24 bp, Homo Sapiens
attttcatattgaattgcaaattc

SEQ ID NO: 62822 - DNA, 17 bp, Homo Sapiens
atttgcgttcagttgat

SEQ ID NO: 62823 - DNA, 27 bp, Homo Sapiens
atttaggttaaatacagaccaagagcc

SEQ ID NO: 62824 - DNA, 20 bp, Homo Sapiens
atttaggttaaatacagacc

SEQ ID NO: 62825 - DNA, 38 bp, Homo Sapiens; identical to SEQ ID NO: 7604

SEQ ID NO: 62826 - DNA, 48 bp, Homo Sapiens; identical to SEQ ID NO: 7580

SEQ ID NO: 62827 - DNA, 44 bp, Homo Sapiens; identical to SEQ ID NO: 7576

SEQ ID NO: 62828 - DNA, 41 bp, Homo Sapiens; identical to SEQ ID NO: 7573

SEQ ID NO: 62829 - DNA, 37 bp, Homo Sapiens; identical to SEQ ID NO: 7569

SEQ ID NO: 62830 - DNA, 34 bp, Homo Sapiens; identical to SEQ ID NO: 7561

SEQ ID NO: 62831 - DNA, 17 bp, Homo Sapiens
attggtcttaggcccca

SEQ ID NO: 62832 - DNA, 48 bp, Homo Sapiens; identical to SEQ ID NO: 7509

SEQ ID NO: 62833 - DNA, 42 bp, Homo Sapiens; identical to SEQ ID NO: 7485

SEQ ID NO: 62834 - DNA, 17 bp, Homo Sapiens
attctcgctggggcctc

SEQ ID NO: 62835 - DNA, 37 bp, Homo Sapiens; identical to SEQ ID NO: 7426

SEQ ID NO: 62836 - DNA, 39 bp, Homo Sapiens; identical to SEQ ID NO: 7404

SEQ ID NO: 62837 - DNA, 38 bp, Homo Sapiens; identical to SEQ ID NO: 7403

SEQ ID NO: 62838 - DNA, 32 bp, Homo Sapiens; identical to SEQ ID NO: 7379

SEQ ID NO: 62839 - DNA, 18 bp, Homo Sapiens
attcccggccagggaacc

SEQ ID NO: 62840 - DNA, 48 bp, Homo Sapiens; identical to SEQ ID NO: 7292

SEQ ID NO: 62841 - DNA, 18 bp, Homo Sapiens
attaactagttttgacaa

SEQ ID NO: 62842 - DNA, 18 bp, Homo Sapiens
atggtgtaatggttagca

SEQ ID NO: 62843 - DNA, 31 bp, Homo Sapiens; identical to SEQ ID NO: 7053

SEQ ID NO: 62844 - DNA, 28 bp, Homo Sapiens
atgggttcgattctcatagtcctagcca

SEQ ID NO: 62845 - DNA, 27 bp, Homo Sapiens
atgggttcgattctcatagtcctagcc

SEQ ID NO: 62846 - DNA, 41 bp, Homo Sapiens; identical to SEQ ID NO: 7006

SEQ ID NO: 62847 - DNA, 31 bp, Homo Sapiens; identical to SEQ ID NO: 6977

SEQ ID NO: 62848 - DNA, 37 bp, Homo Sapiens; identical to SEQ ID NO: 6876

SEQ ID NO: 62849 - DNA, 24 bp, Homo Sapiens
atgccgaggttgtgagttcgatcc

SEQ ID NO: 62850 - DNA, 19 bp, Homo Sapiens
atgcccccatgtctaacaa

SEQ ID NO: 62851 - DNA, 48 bp, Homo Sapiens; identical to SEQ ID NO: 6769

SEQ ID NO: 62852 - DNA, 44 bp, Homo Sapiens; identical to SEQ ID NO: 6768

SEQ ID NO: 62853 - DNA, 33 bp, Homo Sapiens; identical to SEQ ID NO: 6748

SEQ ID NO: 62854 - DNA, 34 bp, Homo Sapiens; identical to SEQ ID NO: 6736

SEQ ID NO: 62855 - DNA, 37 bp, Homo Sapiens; identical to SEQ ID NO: 6717

SEQ ID NO: 62856 - DNA, 43 bp, Homo Sapiens; identical to SEQ ID NO: 6646

SEQ ID NO: 62857 - DNA, 48 bp, Homo Sapiens; identical to SEQ ID NO: 6628

SEQ ID NO: 62858 - DNA, 31 bp, Homo Sapiens; identical to SEQ ID NO: 6623

SEQ ID NO: 62859 - DNA, 30 bp, Homo Sapiens; identical to SEQ ID NO: 6622

SEQ ID NO: 62860 - DNA, 27 bp, Homo Sapiens
atcgggcccataccccgaaaatgttgg

SEQ ID NO: 62861 - DNA, 21 bp, Homo Sapiens
atcgggcccataccccgaaaa

SEQ ID NO: 62862 - DNA, 48 bp, Homo Sapiens; identical to SEQ ID NO: 6485

SEQ ID NO: 62863 - DNA, 48 bp, Homo Sapiens; identical to SEQ ID NO: 54722

SEQ ID NO: 62864 - DNA, 16 bp, Homo Sapiens
atccaatggacatatg

SEQ ID NO: 62865 - DNA, 35 bp, Homo Sapiens; identical to SEQ ID NO: 6409

SEQ ID NO: 62866 - DNA, 42 bp, Homo Sapiens; identical to SEQ ID NO: 6380

SEQ ID NO: 62867 - DNA, 32 bp, Homo Sapiens; identical to SEQ ID NO: 6370

SEQ ID NO: 62868 - DNA, 29 bp, Homo Sapiens
atcagattgtgaatctgacaacagaggct

SEQ ID NO: 62869 - DNA, 17 bp, Homo Sapiens
atcagattgtgaatctg

SEQ ID NO: 62870 - DNA, 33 bp, Homo Sapiens; identical to SEQ ID NO: 6349

SEQ ID NO: 62871 - DNA, 36 bp, Homo Sapiens; identical to SEQ ID NO: 6344

SEQ ID NO: 62872 - DNA, 33 bp, Homo Sapiens; identical to SEQ ID NO: 6322

SEQ ID NO: 62873 - DNA, 27 bp, Homo Sapiens
atcagaagattctaggttcgactcctg

SEQ ID NO: 62874 - DNA, 23 bp, Homo Sapiens
atcagaagattccaggttcgact

SEQ ID NO: 62875 - DNA, 21 bp, Homo Sapiens
atcacgtctgctttacacgca

SEQ ID NO: 62876 - DNA, 29 bp, Homo Sapiens
atattgaattgcaaattcgaagaagcagc

SEQ ID NO: 62877 - DNA, 28 bp, Homo Sapiens
atatagtttaaccaaaacatcagattgt

SEQ ID NO: 62878 - DNA, 25 bp, Homo Sapiens
atagtggtgagcatagctgccttcc

SEQ ID NO: 62879 - DNA, 22 bp, Homo Sapiens
atagtaccgttaacttccaatt

SEQ ID NO: 62880 - DNA, 16 bp, Homo Sapiens
atagctcagtggtaga

SEQ ID NO: 62881 - DNA, 20 bp, Homo Sapiens
atagctcaggggttagagca

SEQ ID NO: 62882 - DNA, 21 bp, Homo Sapiens
atagcgcattggacttctaat

SEQ ID NO: 62883 - DNA, 32 bp, Homo Sapiens; identical to SEQ ID NO: 6013

SEQ ID NO: 62884 - DNA, 20 bp, Homo Sapiens
atacaacgatggtttttcat

SEQ ID NO: 62885 - DNA, 42 bp, Homo Sapiens; identical to SEQ ID NO: 5969

SEQ ID NO: 62886 - DNA, 30 bp, Homo Sapiens; identical to SEQ ID NO: 5933

SEQ ID NO: 62887 - DNA, 27 bp, Homo Sapiens
ataagctatcgggcccataccccgaaa

SEQ ID NO: 62888 - DNA, 25 bp, Homo Sapiens
ataagctatcgggcccataccccga

SEQ ID NO: 62889 - DNA, 25 bp, Homo Sapiens
ataaaacttaaaactttacagtcag

SEQ ID NO: 62890 - DNA, 40 bp, Homo Sapiens; identical to SEQ ID NO: 5855

SEQ ID NO: 62891 - DNA, 34 bp, Homo Sapiens; identical to SEQ ID NO: 5852

SEQ ID NO: 62892 - DNA, 27 bp, Homo Sapiens
agtttaaacaaaacgaatgatttcgac

SEQ ID NO: 62893 - DNA, 31 bp, Homo Sapiens; identical to SEQ ID NO: 5784

SEQ ID NO: 62894 - DNA, 17 bp, Homo Sapiens
agttgatgcagagtggg

SEQ ID NO: 62895 - DNA, 28 bp, Homo Sapiens
agttctggtctccggatggaggcgtggg

SEQ ID NO: 62896 - DNA, 27 bp, Homo Sapiens
agtggttaggattcggcgctctcaccg

SEQ ID NO: 62897 - DNA, 19 bp, Homo Sapiens
agtggttaaggcgttggac

SEQ ID NO: 62898 - DNA, 20 bp, Homo Sapiens
agtggtcatcacgttcgcct

SEQ ID NO: 62899 - DNA, 16 bp, Homo Sapiens
agtggctaggattcgg

SEQ ID NO: 62900 - DNA, 23 bp, Homo Sapiens
agtctcttcggaggcgtgggttc

SEQ ID NO: 62901 - DNA, 27 bp, Homo Sapiens
agtctcataatctgaaggtcctgagtt

SEQ ID NO: 62902 - DNA, 19 bp, Homo Sapiens
agtcggtggagcatgggac

SEQ ID NO: 62903 - DNA, 28 bp, Homo Sapiens
agtcggtagagcatgggactcttaatct

SEQ ID NO: 62904 - DNA, 37 bp, Homo Sapiens; identical to SEQ ID NO: 5442

SEQ ID NO: 62905 - DNA, 28 bp, Homo Sapiens
agtcggtagagcatgagacccttaatct

SEQ ID NO: 62906 - DNA, 26 bp, Homo Sapiens
agtcggtagagcatgagacccttaat

SEQ ID NO: 62907 - DNA, 25 bp, Homo Sapiens
agtcggtagagcatgagacccttaa

SEQ ID NO: 62908 - DNA, 22 bp, Homo Sapiens
agtcggtagagcatgagaccct

SEQ ID NO: 62909 - DNA, 20 bp, Homo Sapiens
agtcggtagagcatgagacc

SEQ ID NO: 62910 - DNA, 27 bp, Homo Sapiens
agtaagttgcaatacttaatttctgcc

SEQ ID NO: 62911 - DNA, 25 bp, Homo Sapiens
aggttcgactcctggctggctcgcc

SEQ ID NO: 62912 - DNA, 26 bp, Homo Sapiens
aggtggcccgggttcgactcccggta

SEQ ID NO: 62913 - DNA, 40 bp, Homo Sapiens; identical to SEQ ID NO: 5200

SEQ ID NO: 62914 - DNA, 32 bp, Homo Sapiens; identical to SEQ ID NO: 5146

SEQ ID NO: 62915 - DNA, 48 bp, Homo Sapiens; identical to SEQ ID NO: 5129

SEQ ID NO: 62916 - DNA, 47 bp, Homo Sapiens; identical to SEQ ID NO: 5128

SEQ ID NO: 62917 - DNA, 29 bp, Homo Sapiens
agggtcgtgggttcgagccccacgttggg

SEQ ID NO: 62918 - DNA, 35 bp, Homo Sapiens; identical to SEQ ID NO: 4954

SEQ ID NO: 62919 - DNA, 27 bp, Homo Sapiens
aggcatcagcctccggagctggggatt

SEQ ID NO: 62920 - DNA, 35 bp, Homo Sapiens; identical to SEQ ID NO: 4895

SEQ ID NO: 62921 - DNA, 32 bp, Homo Sapiens; identical to SEQ ID NO: 4892

SEQ ID NO: 62922 - DNA, 20 bp, Homo Sapiens
aggatggggtgtgataggtg

SEQ ID NO: 62923 - DNA, 34 bp, Homo Sapiens; identical to SEQ ID NO: 4795

SEQ ID NO: 62924 - DNA, 31 bp, Homo Sapiens; identical to SEQ ID NO: 4792

SEQ ID NO: 62925 - DNA, 16 bp, Homo Sapiens
agcttcaaacctgccg

SEQ ID NO: 62926 - DNA, 42 bp, Homo Sapiens; identical to SEQ ID NO: 4739

SEQ ID NO: 62927 - DNA, 29 bp, Homo Sapiens
agctgttaactaagtgtttgtgggtttaa

SEQ ID NO: 62928 - DNA, 19 bp, Homo Sapiens
agctgttaactaagtgttt

SEQ ID NO: 62929 - DNA, 48 bp, Homo Sapiens; identical to SEQ ID NO: 4702

SEQ ID NO: 62930 - DNA, 38 bp, Homo Sapiens; identical to SEQ ID NO: 4693

SEQ ID NO: 62931 - DNA, 33 bp, Homo Sapiens; identical to SEQ ID NO: 4660

SEQ ID NO: 62932 - DNA, 33 bp, Homo Sapiens; identical to SEQ ID NO: 4645

SEQ ID NO: 62933 - DNA, 27 bp, Homo Sapiens
agctcagtcggtagagcatgagaccct

SEQ ID NO: 62934 - DNA, 26 bp, Homo Sapiens
agctcagtcggtagagcatgagaccc

SEQ ID NO: 62935 - DNA, 25 bp, Homo Sapiens
agctcagtcggtagagcatgagacc

SEQ ID NO: 62936 - DNA, 45 bp, Homo Sapiens; identical to SEQ ID NO: 4616

SEQ ID NO: 62937 - DNA, 29 bp, Homo Sapiens
agctcacaagaactgctaactcatgcccc

SEQ ID NO: 62938 - DNA, 35 bp, Homo Sapiens; identical to SEQ ID NO: 4584

SEQ ID NO: 62939 - DNA, 34 bp, Homo Sapiens; identical to SEQ ID NO: 4583

SEQ ID NO: 62940 - DNA, 31 bp, Homo Sapiens; identical to SEQ ID NO: 4580

SEQ ID NO: 62941 - DNA, 17 bp, Homo Sapiens
agctatcgggcccatac

SEQ ID NO: 62942 - DNA, 40 bp, Homo Sapiens; identical to SEQ ID NO: 4553

SEQ ID NO: 62943 - DNA, 24 bp, Homo Sapiens
agcgtgctgggcccataacccaga

SEQ ID NO: 62944 - DNA, 21 bp, Homo Sapiens
agcgtgctgggcccataaccc

SEQ ID NO: 62945 - DNA, 21 bp, Homo Sapiens
agcgcattggacttctaattc

SEQ ID NO: 62946 - DNA, 30 bp, Homo Sapiens; identical to SEQ ID NO: 4432

SEQ ID NO: 62947 - DNA, 34 bp, Homo Sapiens; identical to SEQ ID NO: 4416

SEQ ID NO: 62948 - DNA, 31 bp, Homo Sapiens; identical to SEQ ID NO: 4382

SEQ ID NO: 62949 - DNA, 31 bp, Homo Sapiens; identical to SEQ ID NO: 4348

SEQ ID NO: 62950 - DNA, 29 bp, Homo Sapiens
agcatgggactcttaatcccagggtcgtg

SEQ ID NO: 62951 - DNA, 36 bp, Homo Sapiens; identical to SEQ ID NO: 4317

SEQ ID NO: 62952 - DNA, 30 bp, Homo Sapiens; identical to SEQ ID NO: 4306

SEQ ID NO: 62953 - DNA, 27 bp, Homo Sapiens
agcagcttcaaacctgccggggcttcc

SEQ ID NO: 62954 - DNA, 26 bp, Homo Sapiens
agcagcttcaaacctgccggggcttc

SEQ ID NO: 62955 - DNA, 25 bp, Homo Sapiens
agcagcttcaaacctgccggggctt

SEQ ID NO: 62956 - DNA, 31 bp, Homo Sapiens; identical to SEQ ID NO: 4260

SEQ ID NO: 62957 - DNA, 29 bp, Homo Sapiens
agcactctggactttgaatccagcgatcc

SEQ ID NO: 62958 - DNA, 36 bp, Homo Sapiens; identical to SEQ ID NO: 4247

SEQ ID NO: 62959 - DNA, 48 bp, Homo Sapiens; identical to SEQ ID NO: 4219

SEQ ID NO: 62960 - DNA, 46 bp, Homo Sapiens; identical to SEQ ID NO: 4217

SEQ ID NO: 62961 - DNA, 33 bp, Homo Sapiens; identical to SEQ ID NO: 4212

SEQ ID NO: 62962 - DNA, 32 bp, Homo Sapiens; identical to SEQ ID NO: 4211

SEQ ID NO: 62963 - DNA, 27 bp, Homo Sapiens
agcaatacactgaaaatgtttagacgg

SEQ ID NO: 62964 - DNA, 41 bp, Homo Sapiens; identical to SEQ ID NO: 4159

SEQ ID NO: 62965 - DNA, 40 bp, Homo Sapiens; identical to SEQ ID NO: 4158

SEQ ID NO: 62966 - DNA, 28 bp, Homo Sapiens
agattgtgaatctgacaacagaggctta

SEQ ID NO: 62967 - DNA, 18 bp, Homo Sapiens
agattgcaggttcgagtc

SEQ ID NO: 62968 - DNA, 46 bp, Homo Sapiens; identical to SEQ ID NO: 4104

SEQ ID NO: 62969 - DNA, 24 bp, Homo Sapiens
agattaagagaaccaacacctctt

SEQ ID NO: 62970 - DNA, 27 bp, Homo Sapiens
agatcctgggttcgaatcccagcggtg

SEQ ID NO: 62971 - DNA, 41 bp, Homo Sapiens; identical to SEQ ID NO: 4046

SEQ ID NO: 62972 - DNA, 37 bp, Homo Sapiens; identical to SEQ ID NO: 4043

SEQ ID NO: 62973 - DNA, 25 bp, Homo Sapiens
agagtgtagcttaacacaaagcacc

SEQ ID NO: 62974 - DNA, 16 bp, Homo Sapiens
agaggtccctggttca

SEQ ID NO: 62975 - DNA, 28 bp, Homo Sapiens
agagccttcaaagccctcagtaagttgc

SEQ ID NO: 62976 - DNA, 21 bp, Homo Sapiens
agagccagactgcctgggttt

SEQ ID NO: 62977 - DNA, 32 bp, Homo Sapiens; identical to SEQ ID NO: 3921

SEQ ID NO: 62978 - DNA, 32 bp, Homo Sapiens; identical to SEQ ID NO: 3911

SEQ ID NO: 62979 - DNA, 19 bp, Homo Sapiens
agagaaccaacacctcttt

SEQ ID NO: 62980 - DNA, 16 bp, Homo Sapiens
agacaggggttaggcc

SEQ ID NO: 62981 - DNA, 42 bp, Homo Sapiens; identical to SEQ ID NO: 3816

SEQ ID NO: 62982 - DNA, 40 bp, Homo Sapiens; identical to SEQ ID NO: 3675

SEQ ID NO: 62983 - DNA, 34 bp, Homo Sapiens; identical to SEQ ID NO: 3673

SEQ ID NO: 62984 - DNA, 25 bp, Homo Sapiens
agaaatttaggttaaatacagacca

SEQ ID NO: 62985 - DNA, 48 bp, Homo Sapiens; identical to SEQ ID NO: 3662

SEQ ID NO: 62986 - DNA, 35 bp, Homo Sapiens; identical to SEQ ID NO: 3654

SEQ ID NO: 62987 - DNA, 48 bp, Homo Sapiens; identical to SEQ ID NO: 3634

SEQ ID NO: 62988 - DNA, 41 bp, Homo Sapiens; identical to SEQ ID NO: 3627

SEQ ID NO: 62989 - DNA, 33 bp, Homo Sapiens; identical to SEQ ID NO: 3620

SEQ ID NO: 62990 - DNA, 26 bp, Homo Sapiens
agaaagctcacaagaactgctaactc

SEQ ID NO: 62991 - DNA, 27 bp, Homo Sapiens
actttgtcaaagttaaattataggcta

SEQ ID NO: 62992 - DNA, 17 bp, Homo Sapiens
actttgaatccagcgat

SEQ ID NO: 62993 - DNA, 31 bp, Homo Sapiens; identical to SEQ ID NO: 3523

SEQ ID NO: 62994 - DNA, 21 bp, Homo Sapiens
acttataatgccgaggttgtg

SEQ ID NO: 62995 - DNA, 38 bp, Homo Sapiens; identical to SEQ ID NO: 3418

SEQ ID NO: 62996 - DNA, 33 bp, Homo Sapiens; identical to SEQ ID NO: 3362

SEQ ID NO: 62997 - DNA, 33 bp, Homo Sapiens; identical to SEQ ID NO: 3335

SEQ ID NO: 62998 - DNA, 48 bp, Homo Sapiens; identical to SEQ ID NO: 3325

SEQ ID NO: 62999 - DNA, 30 bp, Homo Sapiens; identical to SEQ ID NO: 3304

SEQ ID NO: 63000 - DNA, 37 bp, Homo Sapiens; identical to SEQ ID NO: 3150

SEQ ID NO: 63001 - DNA, 35 bp, Homo Sapiens; identical to SEQ ID NO: 3122

SEQ ID NO: 63002 - DNA, 30 bp, Homo Sapiens; identical to SEQ ID NO: 3111

SEQ ID NO: 63003 - DNA, 34 bp, Homo Sapiens; identical to SEQ ID NO: 3107

SEQ ID NO: 63004 - DNA, 39 bp, Homo Sapiens; identical to SEQ ID NO: 3083

SEQ ID NO: 63005 - DNA, 33 bp, Homo Sapiens; identical to SEQ ID NO: 3077

SEQ ID NO: 63006 - DNA, 32 bp, Homo Sapiens; identical to SEQ ID NO: 3076

SEQ ID NO: 63007 - DNA, 27 bp, Homo Sapiens
acgatggtttttcatatcattggtcgt

SEQ ID NO: 63008 - DNA, 47 bp, Homo Sapiens; identical to SEQ ID NO: 3056

SEQ ID NO: 63009 - DNA, 22 bp, Homo Sapiens
accggagatgaaaacctttttc

SEQ ID NO: 63010 - DNA, 21 bp, Homo Sapiens
accggagatgaaaaccttttt

SEQ ID NO: 63011 - DNA, 16 bp, Homo Sapiens
accgagcggaaacacc

SEQ ID NO: 63012 - DNA, 41 bp, Homo Sapiens; identical to SEQ ID NO: 2829

SEQ ID NO: 63013 - DNA, 23 bp, Homo Sapiens
acccaacttacacttaggagatt

SEQ ID NO: 63014 - DNA, 33 bp, Homo Sapiens; identical to SEQ ID NO: 2782

SEQ ID NO: 63015 - DNA, 48 bp, Homo Sapiens; identical to SEQ ID NO: 2740

SEQ ID NO: 63016 - DNA, 45 bp, Homo Sapiens; identical to SEQ ID NO: 2690

SEQ ID NO: 63017 - DNA, 44 bp, Homo Sapiens; identical to SEQ ID NO: 2689

SEQ ID NO: 63018 - DNA, 39 bp, Homo Sapiens; identical to SEQ ID NO: 2684

SEQ ID NO: 63019 - DNA, 19 bp, Homo Sapiens
acatcagattgtgaatctg

SEQ ID NO: 63020 - DNA, 31 bp, Homo Sapiens; identical to SEQ ID NO: 2621

SEQ ID NO: 63021 - DNA, 41 bp, Homo Sapiens; identical to SEQ ID NO: 2515

SEQ ID NO: 63022 - DNA, 45 bp, Homo Sapiens; identical to SEQ ID NO: 2458

SEQ ID NO: 63023 - DNA, 41 bp, Homo Sapiens; identical to SEQ ID NO: 2455

SEQ ID NO: 63024 - DNA, 37 bp, Homo Sapiens; identical to SEQ ID NO: 2453

SEQ ID NO: 63025 - DNA, 18 bp, Homo Sapiens
acaacgatggtttttcat

SEQ ID NO: 63026 - DNA, 18 bp, Homo Sapiens
acaaagcacccaacttac

SEQ ID NO: 63027 - DNA, 26 bp, Homo Sapiens
acaaaacgaatgatttcgactcatta

SEQ ID NO: 63028 - DNA, 26 bp, Homo Sapiens
aattgcaaattcgaagaagcagcttc

SEQ ID NO: 63029 - DNA, 19 bp, Homo Sapiens
aattgcaaattcgaagaag

SEQ ID NO: 63030 - DNA, 20 bp, Homo Sapiens
aattcgaagaagcagcttca

SEQ ID NO: 63031 - DNA, 18 bp, Homo Sapiens
aattcaaaggttccgggt

SEQ ID NO: 63032 - DNA, 18 bp, Homo Sapiens
aattagaatcttagcttt

SEQ ID NO: 63033 - DNA, 33 bp, Homo Sapiens; identical to SEQ ID NO: 2307

SEQ ID NO: 63034 - DNA, 40 bp, Homo Sapiens; identical to SEQ ID NO: 2260

SEQ ID NO: 63035 - DNA, 18 bp, Homo Sapiens
aatggtagaattctcgcc

SEQ ID NO: 63036 - DNA, 43 bp, Homo Sapiens; identical to SEQ ID NO: 2207

SEQ ID NO: 63037 - DNA, 23 bp, Homo Sapiens
aatggataaggcatcagcctccg

SEQ ID NO: 63038 - DNA, 23 bp, Homo Sapiens
aatggacatatgtccgcgtgggt

SEQ ID NO: 63039 - DNA, 44 bp, Homo Sapiens; identical to SEQ ID NO: 2136

SEQ ID NO: 63040 - DNA, 27 bp, Homo Sapiens
aatgatttcgactcattaaattatgat

SEQ ID NO: 63041 - DNA, 19 bp, Homo Sapiens
aatgatttcgactcattaa

SEQ ID NO: 63042 - DNA, 48 bp, Homo Sapiens; identical to SEQ ID NO: 2026

SEQ ID NO: 63043 - DNA, 16 bp, Homo Sapiens
aatcccaccgctgcca

SEQ ID NO: 63044 - DNA, 48 bp, Homo Sapiens; identical to SEQ ID NO: 1967

SEQ ID NO: 63045 - DNA, 48 bp, Homo Sapiens; identical to SEQ ID NO: 1961

SEQ ID NO: 63046 - DNA, 32 bp, Homo Sapiens; identical to SEQ ID NO: 1917

SEQ ID NO: 63047 - DNA, 39 bp, Homo Sapiens; identical to SEQ ID NO: 1900

SEQ ID NO: 63048 - DNA, 48 bp, Homo Sapiens; identical to SEQ ID NO: 1889

SEQ ID NO: 63049 - DNA, 41 bp, Homo Sapiens; identical to SEQ ID NO: 1888

SEQ ID NO: 63050 - DNA, 37 bp, Homo Sapiens; identical to SEQ ID NO: 1887

SEQ ID NO: 63051 - DNA, 39 bp, Homo Sapiens; identical to SEQ ID NO: 1878

SEQ ID NO: 63052 - DNA, 28 bp, Homo Sapiens
aatagtttaaattagaatcttagctttg

SEQ ID NO: 63053 - DNA, 31 bp, Homo Sapiens; identical to SEQ ID NO: 1853

SEQ ID NO: 63054 - DNA, 28 bp, Homo Sapiens
aataggagcttaaacccccttatttcta

SEQ ID NO: 63055 - DNA, 26 bp, Homo Sapiens
aataggagcttaaacccccttatttc

SEQ ID NO: 63056 - DNA, 35 bp, Homo Sapiens; identical to SEQ ID NO: 1817

SEQ ID NO: 63057 - DNA, 26 bp, Homo Sapiens
aatacaacgatggtttttcatatcat

SEQ ID NO: 63058 - DNA, 23 bp, Homo Sapiens
aatacaacgatggtttttcatat

SEQ ID NO: 63059 - DNA, 26 bp, Homo Sapiens
aataataggagcttaaacccccttat

SEQ ID NO: 63060 - DNA, 36 bp, Homo Sapiens; identical to SEQ ID NO: 1769

SEQ ID NO: 63061 - DNA, 25 bp, Homo Sapiens
aagttaaagattaagagaaccaaca

SEQ ID NO: 63062 - DNA, 31 bp, Homo Sapiens; identical to SEQ ID NO: 1676

SEQ ID NO: 63063 - DNA, 33 bp, Homo Sapiens; identical to SEQ ID NO: 1658

SEQ ID NO: 63064 - DNA, 48 bp, Homo Sapiens; identical to SEQ ID NO: 1630

SEQ ID NO: 63065 - DNA, 34 bp, Homo Sapiens; identical to SEQ ID NO: 1611

SEQ ID NO: 63066 - DNA, 32 bp, Homo Sapiens; identical to SEQ ID NO: 1594

SEQ ID NO: 63067 - DNA, 32 bp, Homo Sapiens; identical to SEQ ID NO: 1540

SEQ ID NO: 63068 - DNA, 25 bp, Homo Sapiens
aagctcacaagaactgctaactcat

SEQ ID NO: 63069 - DNA, 16 bp, Homo Sapiens
aagctcacaagaactg

SEQ ID NO: 63070 - DNA, 36 bp, Homo Sapiens; identical to SEQ ID NO: 1519

SEQ ID NO: 63071 - DNA, 34 bp, Homo Sapiens; identical to SEQ ID NO: 1517

SEQ ID NO: 63072 - DNA, 28 bp, Homo Sapiens
aagctatcgggcccataccccgaaaatg

SEQ ID NO: 63073 - DNA, 35 bp, Homo Sapiens; identical to SEQ ID NO: 1496

SEQ ID NO: 63074 - DNA, 35 bp, Homo Sapiens; identical to SEQ ID NO: 1481

SEQ ID NO: 63075 - DNA, 39 bp, Homo Sapiens; identical to SEQ ID NO: 1448

SEQ ID NO: 63076 - DNA, 37 bp, Homo Sapiens; identical to SEQ ID NO: 1427

SEQ ID NO: 63077 - DNA, 34 bp, Homo Sapiens; identical to SEQ ID NO: 1400

SEQ ID NO: 63078 - DNA, 31 bp, Homo Sapiens; identical to SEQ ID NO: 1377

SEQ ID NO: 63079 - DNA, 27 bp, Homo Sapiens
aagattaagagaaccaacacctcttta

SEQ ID NO: 63080 - DNA, 33 bp, Homo Sapiens; identical to SEQ ID NO: 1306

SEQ ID NO: 63081 - DNA, 18 bp, Homo Sapiens
aagagttactttgataga

SEQ ID NO: 63082 - DNA, 26 bp, Homo Sapiens
aagagccttcaaagccctcagtaagt

SEQ ID NO: 63083 - DNA, 27 bp, Homo Sapiens
aagagaaccaacacctctttacagtga

SEQ ID NO: 63084 - DNA, 17 bp, Homo Sapiens
aagaagcagcttcaaac

SEQ ID NO: 63085 - DNA, 31 bp, Homo Sapiens; identical to SEQ ID NO: 1228

SEQ ID NO: 63086 - DNA, 30 bp, Homo Sapiens; identical to SEQ ID NO: 1205

SEQ ID NO: 63087 - DNA, 28 bp, Homo Sapiens
aactttgtcaaagttaaattataggcta

SEQ ID NO: 63088 - DNA, 46 bp, Homo Sapiens; identical to SEQ ID NO: 1128

SEQ ID NO: 63089 - DNA, 35 bp, Homo Sapiens; identical to SEQ ID NO: 1125

SEQ ID NO: 63090 - DNA, 18 bp, Homo Sapiens
aactgggcggaaacacca

SEQ ID NO: 63091 - DNA, 17 bp, Homo Sapiens
aactgggcggaaacacc

SEQ ID NO: 63092 - DNA, 41 bp, Homo Sapiens; identical to SEQ ID NO: 1108

SEQ ID NO: 63093 - DNA, 34 bp, Homo Sapiens; identical to SEQ ID NO: 1038

SEQ ID NO: 63094 - DNA, 36 bp, Homo Sapiens; identical to SEQ ID NO: 1009

SEQ ID NO: 63095 - DNA, 28 bp, Homo Sapiens
aacgatggtttttcatatcattggtcgt

SEQ ID NO: 63096 - DNA, 16 bp, Homo Sapiens
aacgatggtttttcat

SEQ ID NO: 63097 - DNA, 48 bp, Homo Sapiens; identical to SEQ ID NO: 998

SEQ ID NO: 63098 - DNA, 16 bp, Homo Sapiens
aacgaatgatttcgac

SEQ ID NO: 63099 - DNA, 48 bp, Homo Sapiens; identical to SEQ ID NO: 978

SEQ ID NO: 63100 - DNA, 18 bp, Homo Sapiens
aaccgggcagaaacacca

SEQ ID NO: 63101 - DNA, 23 bp, Homo Sapiens
aaccggagatgaaaacctttttc

SEQ ID NO: 63102 - DNA, 21 bp, Homo Sapiens
aaccggagatgaaaacctttt

SEQ ID NO: 63103 - DNA, 18 bp, Homo Sapiens
aaccgagcggaaacacca

SEQ ID NO: 63104 - DNA, 17 bp, Homo Sapiens
aaccgagcggaaacacc

SEQ ID NO: 63105 - DNA, 37 bp, Homo Sapiens; identical to SEQ ID NO: 911

SEQ ID NO: 63106 - DNA, 34 bp, Homo Sapiens; identical to SEQ ID NO: 838

SEQ ID NO: 63107 - DNA, 32 bp, Homo Sapiens; identical to SEQ ID NO: 836

SEQ ID NO: 63108 - DNA, 22 bp, Homo Sapiens
aaccaaaacatcagattgtgaa

SEQ ID NO: 63109 - DNA, 47 bp, Homo Sapiens; identical to SEQ ID NO: 816

SEQ ID NO: 63110 - DNA, 45 bp, Homo Sapiens; identical to SEQ ID NO: 814

SEQ ID NO: 63111 - DNA, 34 bp, Homo Sapiens; identical to SEQ ID NO: 783

SEQ ID NO: 63112 - DNA, 34 bp, Homo Sapiens; identical to SEQ ID NO: 771

SEQ ID NO: 63113 - DNA, 24 bp, Homo Sapiens
aacaggagatcctgggttcgaatc

SEQ ID NO: 63114 - DNA, 31 bp, Homo Sapiens; identical to SEQ ID NO: 759

SEQ ID NO: 63115 - DNA, 28 bp, Homo Sapiens
aacagctatccattggtcttaggcccca

SEQ ID NO: 63116 - DNA, 29 bp, Homo Sapiens
aacagaggcttacgaccccttatttaccc

SEQ ID NO: 63117 - DNA, 24 bp, Homo Sapiens
aacagaggcttacgaccccttatt

SEQ ID NO: 63118 - DNA, 20 bp, Homo Sapiens
aacagaggcttacgacccct

SEQ ID NO: 63119 - DNA, 34 bp, Homo Sapiens; identical to SEQ ID NO: 707

SEQ ID NO: 63120 - DNA, 27 bp, Homo Sapiens
aacaaaacgaatgatttcgactcatta

SEQ ID NO: 63121 - DNA, 22 bp, Homo Sapiens
aaatttaggttaaatacagacc

SEQ ID NO: 63122 - DNA, 22 bp, Homo Sapiens
aaattataggctaaatcctata

SEQ ID NO: 63123 - DNA, 20 bp, Homo Sapiens
aaattagaatcttagctttg

SEQ ID NO: 63124 - DNA, 34 bp, Homo Sapiens; identical to SEQ ID NO: 646

SEQ ID NO: 63125 - DNA, 25 bp, Homo Sapiens
aaatgtttagacgggctcacatcac

SEQ ID NO: 63126 - DNA, 23 bp, Homo Sapiens
aaatgtttagacgggctcacatc

SEQ ID NO: 63127 - DNA, 30 bp, Homo Sapiens; identical to SEQ ID NO: 617

SEQ ID NO: 63128 - DNA, 29 bp, Homo Sapiens
aaatacagaccaagagccttcaaagccct

SEQ ID NO: 63129 - DNA, 28 bp, Homo Sapiens
aaatacagaccaagagccttcaaagccc

SEQ ID NO: 63130 - DNA, 27 bp, Homo Sapiens
aaatacagaccaagagccttcaaagcc

SEQ ID NO: 63131 - DNA, 48 bp, Homo Sapiens; identical to SEQ ID NO: 545

SEQ ID NO: 63132 - DNA, 46 bp, Homo Sapiens; identical to SEQ ID NO: 543

SEQ ID NO: 63133 - DNA, 24 bp, Homo Sapiens
aaagttaaattataggctaaatcc

SEQ ID NO: 63134 - DNA, 21 bp, Homo Sapiens
aaagttaaattataggctaaa

SEQ ID NO: 63135 - DNA, 20 bp, Homo Sapiens
aaagttaaattataggctaa

SEQ ID NO: 63136 - DNA, 37 bp, Homo Sapiens; identical to SEQ ID NO: 420

SEQ ID NO: 63137 - DNA, 34 bp, Homo Sapiens; identical to SEQ ID NO: 417

SEQ ID NO: 63138 - DNA, 32 bp, Homo Sapiens; identical to SEQ ID NO: 415

SEQ ID NO: 63139 - DNA, 31 bp, Homo Sapiens; identical to SEQ ID NO: 414

SEQ ID NO: 63140 - DNA, 22 bp, Homo Sapiens
aaagctcacaagaactgctaac

SEQ ID NO: 63141 - DNA, 21 bp, Homo Sapiens
aaagctcacaagaactgctaa

SEQ ID NO: 63142 - DNA, 17 bp, Homo Sapiens
aaagctcacaagaactg

SEQ ID NO: 63143 - DNA, 38 bp, Homo Sapiens; identical to SEQ ID NO: 394

SEQ ID NO: 63144 - DNA, 16 bp, Homo Sapiens
aaagcacccaacttac

SEQ ID NO: 63145 - DNA, 28 bp, Homo Sapiens
aaagattaagagaaccaacacctcttta

SEQ ID NO: 63146 - DNA, 22 bp, Homo Sapiens
aaagacaggggttaggcctctt

SEQ ID NO: 63147 - DNA, 25 bp, Homo Sapiens
aaacgaatgatttcgactcattaaa

SEQ ID NO: 63148 - DNA, 24 bp, Homo Sapiens
aaacgaatgatttcgactcattaa

SEQ ID NO: 63149 - DNA, 18 bp, Homo Sapiens
aaaccggagatgaaaacc

SEQ ID NO: 63150 - DNA, 20 bp, Homo Sapiens
aaaccgaagatcgcgggttc

SEQ ID NO: 63151 - DNA, 33 bp, Homo Sapiens; identical to SEQ ID NO: 244

SEQ ID NO: 63152 - DNA, 48 bp, Homo Sapiens; identical to SEQ ID NO: 222

SEQ ID NO: 63153 - DNA, 39 bp, Homo Sapiens; identical to SEQ ID NO: 187

SEQ ID NO: 63154 - DNA, 17 bp, Homo Sapiens
aaaagagttactttgat

SEQ ID NO: 63155 - DNA, 27 bp, Homo Sapiens
aaaacttaaaactttacagtcagaggt

SEQ ID NO: 63156 - DNA, 17 bp, Homo Sapiens
aaaacttaaaactttac

SEQ ID NO: 63157 - DNA, 24 bp, Homo Sapiens
aaaacgaatgatttcgactcatta

SEQ ID NO: 63158 - DNA, 18 bp, Homo Sapiens
aaaacgaatgatttcgac

SEQ ID NO: 63159 - DNA, 48 bp, Homo Sapiens; identical to SEQ ID NO: 59

SEQ ID NO: 63160 - DNA, 16 bp, Homo Sapiens
aaaaagtcatggaggc

SEQ ID NO: 63161 - DNA, 23 bp, Homo Sapiens
aaaaaccatttcataactttgtc

SEQ ID NO: 63162 - DNA, 18 bp, Homo Sapiens
aaaaaccatttcataact

SEQ ID NO: 63163 - DNA, 29 bp, Homo Sapiens
tttgtgggtttaagtcccattggtctagc

SEQ ID NO: 63164 - DNA, 28 bp, Homo Sapiens
ttgagggttcgaatcccttcgtggttgc

SEQ ID NO: 63165 - DNA, 43 bp, Homo Sapiens; identical to SEQ ID NO: 42190

SEQ ID NO: 63166 - DNA, 30 bp, Homo Sapiens; identical to SEQ ID NO: 42015

SEQ ID NO: 63167 - DNA, 31 bp, Homo Sapiens; identical to SEQ ID NO: 26956

SEQ ID NO: 63168 - DNA, 32 bp, Homo Sapiens; identical to SEQ ID NO: 26876

SEQ ID NO: 63169 - DNA, 19 bp, Homo Sapiens
tcgactcccggtatgggaa

SEQ ID NO: 63170 - DNA, 20 bp, Homo Sapiens
tcgaatcccagtagagcctc

SEQ ID NO: 63171 - DNA, 20 bp, Homo Sapiens
tcgaaaccgggcagaagcac

SEQ ID NO: 63172 - DNA, 43 bp, Homo Sapiens; identical to SEQ ID NO: 25543

SEQ ID NO: 63173 - DNA, 43 bp, Homo Sapiens; identical to SEQ ID NO: 41033

SEQ ID NO: 63174 - DNA, 34 bp, Homo Sapiens; identical to SEQ ID NO: 24920

SEQ ID NO: 63175 - DNA, 34 bp, Homo Sapiens; identical to SEQ ID NO: 24889

SEQ ID NO: 63176 - DNA, 32 bp, Homo Sapiens; identical to SEQ ID NO: 24143

SEQ ID NO: 63177 - DNA, 34 bp, Homo Sapiens; identical to SEQ ID NO: 23656

SEQ ID NO: 63178 - DNA, 22 bp, Homo Sapiens
gttcgagcctcagagagggcac

SEQ ID NO: 63179 - DNA, 29 bp, Homo Sapiens
gtcgctggttcgattccggctcgaaggac

SEQ ID NO: 63180 - DNA, 23 bp, Homo Sapiens
ggttcgattcccggtcatggaac

SEQ ID NO: 63181 - DNA, 24 bp, Homo Sapiens
gggttcgattcccggccagggaac

SEQ ID NO: 63182 - DNA, 25 bp, Homo Sapiens
gggttcgagtcccatctggggtgcc

SEQ ID NO: 63183 - DNA, 28 bp, Homo Sapiens
ggcccgggttcgactcccggtatgggaa

SEQ ID NO: 63184 - DNA, 22 bp, Homo Sapiens
ggagtggttatcacgttcgcct

SEQ ID NO: 63185 - DNA, 36 bp, Homo Sapiens; identical to SEQ ID NO: 17452

SEQ ID NO: 63186 - DNA, 34 bp, Homo Sapiens; identical to SEQ ID NO: 17245

SEQ ID NO: 63187 - DNA, 36 bp, Homo Sapiens; identical to SEQ ID NO: 17222

SEQ ID NO: 63188 - DNA, 16 bp, Homo Sapiens
gcggcccgggttcgac

SEQ ID NO: 63189 - DNA, 37 bp, Homo Sapiens; identical to SEQ ID NO: 16693

SEQ ID NO: 63190 - DNA, 31 bp, Homo Sapiens; identical to SEQ ID NO: 16297

SEQ ID NO: 63191 - DNA, 33 bp, Homo Sapiens; identical to SEQ ID NO: 15309

SEQ ID NO: 63192 - DNA, 18 bp, Homo Sapiens
gaatcctgttcgtgacgc

SEQ ID NO: 63193 - DNA, 43 bp, Homo Sapiens; identical to SEQ ID NO: 14363

SEQ ID NO: 63194 - DNA, 45 bp, Homo Sapiens; identical to SEQ ID NO: 36541

SEQ ID NO: 63195 - DNA, 33 bp, Homo Sapiens; identical to SEQ ID NO: 12180

SEQ ID NO: 63196 - DNA, 23 bp, Homo Sapiens
cgcagcggaagcgtgctgggccc

SEQ ID NO: 63197 - DNA, 17 bp, Homo Sapiens
cgagccccagtggaacc

SEQ ID NO: 63198 - DNA, 40 bp, Homo Sapiens; identical to SEQ ID NO: 11506

SEQ ID NO: 63199 - DNA, 26 bp, Homo Sapiens
cctcggttcgaatccgagtcacggca

SEQ ID NO: 63200 - DNA, 31 bp, Homo Sapiens; identical to SEQ ID NO: 10480

SEQ ID NO: 63201 - DNA, 34 bp, Homo Sapiens; identical to SEQ ID NO: 10147

SEQ ID NO: 63202 - DNA, 36 bp, Homo Sapiens; identical to SEQ ID NO: 10144

SEQ ID NO: 63203 - DNA, 35 bp, Homo Sapiens; identical to SEQ ID NO: 9558

SEQ ID NO: 63204 - DNA, 33 bp, Homo Sapiens; identical to SEQ ID NO: 9045

SEQ ID NO: 63205 - DNA, 24 bp, Homo Sapiens
cagaggtcgatggatcgaaaccat

SEQ ID NO: 63206 - DNA, 38 bp, Homo Sapiens; identical to SEQ ID NO: 33917

SEQ ID NO: 63207 - DNA, 38 bp, Homo Sapiens; identical to SEQ ID NO: 33911

SEQ ID NO: 63208 - DNA, 35 bp, Homo Sapiens; identical to SEQ ID NO: 7382

SEQ ID NO: 63209 - DNA, 38 bp, Homo Sapiens; identical to SEQ ID NO: 6858

SEQ ID NO: 63210 - DNA, 41 bp, Homo Sapiens; identical to SEQ ID NO: 5967

SEQ ID NO: 63211 - DNA, 27 bp, Homo Sapiens
aggcggcccgggttcgactcccggtgt

SEQ ID NO: 63212 - DNA, 41 bp, Homo Sapiens; identical to SEQ ID NO: 4159

SEQ ID NO: 63213 - DNA, 28 bp, Homo Sapiens
accggggttcaattccccgacggggagc

SEQ ID NO: 63214 - DNA, 35 bp, Homo Sapiens; identical to SEQ ID NO: 2927

SEQ ID NO: 63215 - DNA, 17 bp, Homo Sapiens
aatctcggtgggacctc

SEQ ID NO: 63216 - DNA, 22 bp, Homo Sapiens
aagattgcaggttcgagtcctg

SEQ ID NO: 63217 - DNA, 19 bp, Homo Sapiens
aaaccgggcagaagcacca

SEQ ID NO: 63218 - DNA, 37 bp, Homo Sapiens; identical to SEQ ID NO: 28542

SEQ ID NO: 63219 - DNA, 38 bp, Homo Sapiens; identical to SEQ ID NO: 28300

SEQ ID NO: 63220 - DNA, 39 bp, Homo Sapiens; identical to SEQ ID NO: 28285

SEQ ID NO: 63221 - DNA, 30 bp, Homo Sapiens; identical to SEQ ID NO: 28193

SEQ ID NO: 63222 - DNA, 34 bp, Homo Sapiens; identical to SEQ ID NO: 27585

SEQ ID NO: 63223 - DNA, 37 bp, Homo Sapiens; identical to SEQ ID NO: 27495

SEQ ID NO: 63224 - DNA, 27 bp, Homo Sapiens
tgagggttcgaatcccttcgtggttgc

SEQ ID NO: 63225 - DNA, 26 bp, Homo Sapiens
tcggcgctctcaccgccgcggcccgg

SEQ ID NO: 63226 - DNA, 20 bp, Homo Sapiens
tcgaatcccttcgtggttgc

SEQ ID NO: 63227 - DNA, 17 bp, Homo Sapiens
tccattggggtttcccc

SEQ ID NO: 63228 - DNA, 29 bp, Homo Sapiens
tcagtcggtagagcatgagactcttaatc

SEQ ID NO: 63229 - DNA, 34 bp, Homo Sapiens; identical to SEQ ID NO: 40736

SEQ ID NO: 63230 - DNA, 33 bp, Homo Sapiens; identical to SEQ ID NO: 40217

SEQ ID NO: 63231 - DNA, 31 bp, Homo Sapiens; identical to SEQ ID NO: 22605

SEQ ID NO: 63232 - DNA, 32 bp, Homo Sapiens; identical to SEQ ID NO: 22222

SEQ ID NO: 63233 - DNA, 22 bp, Homo Sapiens
gttcgagcctcagagagggcac

SEQ ID NO: 63234 - DNA, 17 bp, Homo Sapiens
gtcgatggatcgaaacc

SEQ ID NO: 63235 - DNA, 34 bp, Homo Sapiens; identical to SEQ ID NO: 20586

SEQ ID NO: 63236 - DNA, 46 bp, Homo Sapiens; identical to SEQ ID NO: 19946

SEQ ID NO: 63237 - DNA, 41 bp, Homo Sapiens; identical to SEQ ID NO: 19531

SEQ ID NO: 63238 - DNA, 25 bp, Homo Sapiens
gcgggttcgaaccccgtccgtgcct

SEQ ID NO: 63239 - DNA, 33 bp, Homo Sapiens; identical to SEQ ID NO: 17144

SEQ ID NO: 63240 - DNA, 36 bp, Homo Sapiens; identical to SEQ ID NO: 16533

SEQ ID NO: 63241 - DNA, 32 bp, Homo Sapiens; identical to SEQ ID NO: 16461

SEQ ID NO: 63242 - DNA, 20 bp, Homo Sapiens
gagtggttaaggcattggac

SEQ ID NO: 63243 - DNA, 32 bp, Homo Sapiens; identical to SEQ ID NO: 15070

SEQ ID NO: 63244 - DNA, 37 bp, Homo Sapiens; identical to SEQ ID NO: 36634

SEQ ID NO: 63245 - DNA, 24 bp, Homo Sapiens
cgggttcgactcccggtatgggaa

SEQ ID NO: 63246 - DNA, 34 bp, Homo Sapiens; identical to SEQ ID NO: 35902

SEQ ID NO: 63247 - DNA, 32 bp, Homo Sapiens; identical to SEQ ID NO: 12458

SEQ ID NO: 63248 - DNA, 28 bp, Homo Sapiens
cgcgtgggttcgaatcccatcctcgtcg

SEQ ID NO: 63249 - DNA, 19 bp, Homo Sapiens
cgatcctcgctggggcctc

SEQ ID NO: 63250 - DNA, 18 bp, Homo Sapiens
cgagccccacgttgggcg

SEQ ID NO: 63251 - DNA, 17 bp, Homo Sapiens
cccatatggtctagcgg

SEQ ID NO: 63252 - DNA, 36 bp, Homo Sapiens; identical to SEQ ID NO: 34630

SEQ ID NO: 63253 - DNA, 32 bp, Homo Sapiens; identical to SEQ ID NO: 9644

SEQ ID NO: 63254 - DNA, 19 bp, Homo Sapiens
cagtggtagagcgcatgct

SEQ ID NO: 63255 - DNA, 16 bp, Homo Sapiens
cagtgggtagagcatc

SEQ ID NO: 63256 - DNA, 37 bp, Homo Sapiens; identical to SEQ ID NO: 9195

SEQ ID NO: 63257 - DNA, 25 bp, Homo Sapiens
caggcggcccgggttcgactcccgg

SEQ ID NO: 63258 - DNA, 17 bp, Homo Sapiens
cagagtggcgcagcgga

SEQ ID NO: 63259 - DNA, 33 bp, Homo Sapiens; identical to SEQ ID NO: 8588

SEQ ID NO: 63260 - DNA, 39 bp, Homo Sapiens; identical to SEQ ID NO: 45221

SEQ ID NO: 63261 - DNA, 41 bp, Homo Sapiens; identical to SEQ ID NO: 5988

SEQ ID NO: 63262 - DNA, 16 bp, Homo Sapiens
agtccctgttcgggcg

SEQ ID NO: 63263 - DNA, 25 bp, Homo Sapiens
aggcggcccgggttcgactcccggt

SEQ ID NO: 63264 - DNA, 37 bp, Homo Sapiens; identical to SEQ ID NO: 4717

SEQ ID NO: 63265 - DNA, 21 bp, Homo Sapiens
agagcatgggactcttaatcc

SEQ ID NO: 63266 - DNA, 26 bp, Homo Sapiens
acttcggatcagaagattgcaggttc

SEQ ID NO: 63267 - DNA, 28 bp, Homo Sapiens
acgtgggttcgaatcccatcctcgtcgc

SEQ ID NO: 63268 - DNA, 25 bp, Homo Sapiens
acaggttcgaatcctgttcgtgacg

SEQ ID NO: 63269 - DNA, 17 bp, Homo Sapiens
aagtccctgttcgggcg

SEQ ID NO: 63270 - DNA, 18 bp, Homo Sapiens
aaccccactcctggtacc

SEQ ID NO: 63271 - DNA, 16 bp, Homo Sapiens
ttttcacccaggcggc

SEQ ID NO: 63272 - DNA, 41 bp, Homo Sapiens; identical to SEQ ID NO: 31016

SEQ ID NO: 63273 - DNA, 40 bp, Homo Sapiens; identical to SEQ ID NO: 30982

SEQ ID NO: 63274 - DNA, 37 bp, Homo Sapiens; identical to SEQ ID NO: 30923

SEQ ID NO: 63275 - DNA, 16 bp, Homo Sapiens
tttcacccaggcggcc

SEQ ID NO: 63276 - DNA, 29 bp, Homo Sapiens
ttgtgggttcgagtcccatctgggtcgcc

SEQ ID NO: 63277 - DNA, 28 bp, Homo Sapiens
ttgtgggttcgagtcccatctggggtgc

SEQ ID NO: 63278 - DNA, 42 bp, Homo Sapiens; identical to SEQ ID NO: 30607

SEQ ID NO: 63279 - DNA, 36 bp, Homo Sapiens; identical to SEQ ID NO: 30251

SEQ ID NO: 63280 - DNA, 35 bp, Homo Sapiens; identical to SEQ ID NO: 30250

SEQ ID NO: 63281 - DNA, 28 bp, Homo Sapiens
ttgagggttcgagtcccttcgtggtcgc

SEQ ID NO: 63282 - DNA, 36 bp, Homo Sapiens; identical to SEQ ID NO: 29983

SEQ ID NO: 63283 - DNA, 22 bp, Homo Sapiens
ttcgactcccggtatgggaacc

SEQ ID NO: 63284 - DNA, 22 bp, Homo Sapiens
ttcgaatccggctcggaggacc

SEQ ID NO: 63285 - DNA, 22 bp, Homo Sapiens
ttcgaatcccagtagagcctcc

SEQ ID NO: 63286 - DNA, 22 bp, Homo Sapiens
ttcgaatcccagcggggcctcc

SEQ ID NO: 63287 - DNA, 36 bp, Homo Sapiens
ttcctggttttcacccaggcggcccgggttcgactc

SEQ ID NO: 63288 - DNA, 44 bp, Homo Sapiens; identical to SEQ ID NO: 29744

SEQ ID NO: 63289 - DNA, 39 bp, Homo Sapiens; identical to SEQ ID NO: 29495

SEQ ID NO: 63290 - DNA, 31 bp, Homo Sapiens; identical to SEQ ID NO: 29365

SEQ ID NO: 63291 - DNA, 33 bp, Homo Sapiens; identical to SEQ ID NO: 29345

SEQ ID NO: 63292 - DNA, 34 bp, Homo Sapiens; identical to SEQ ID NO: 29342

SEQ ID NO: 63293 - DNA, 42 bp, Homo Sapiens; identical to SEQ ID NO: 29275

SEQ ID NO: 63294 - DNA, 17 bp, Homo Sapiens
ttaggattcctggtttt

SEQ ID NO: 63295 - DNA, 46 bp, Homo Sapiens; identical to SEQ ID NO: 29176

SEQ ID NO: 63296 - DNA, 42 bp, Homo Sapiens; identical to SEQ ID NO: 42556

SEQ ID NO: 63297 - DNA, 41 bp, Homo Sapiens; identical to SEQ ID NO: 29026

SEQ ID NO: 63298 - DNA, 18 bp, Homo Sapiens
ttaagatccaatggacat

SEQ ID NO: 63299 - DNA, 27 bp, Homo Sapiens
tgtgggttcgagtcccatctgggtcgc

SEQ ID NO: 63300 - DNA, 41 bp, Homo Sapiens; identical to SEQ ID NO: 28610

SEQ ID NO: 63301 - DNA, 42 bp, Homo Sapiens; identical to SEQ ID NO: 28558

SEQ ID NO: 63302 - DNA, 17 bp, Homo Sapiens
tgtagtggtatcatgca

SEQ ID NO: 63303 - DNA, 24 bp, Homo Sapiens
tggttcgatcccgggtttcggcac

SEQ ID NO: 63304 - DNA, 24 bp, Homo Sapiens
tggttcgaatccggctcggaggac

SEQ ID NO: 63305 - DNA, 18 bp, Homo Sapiens
tggttatcacgtctgctt

SEQ ID NO: 63306 - DNA, 39 bp, Homo Sapiens; identical to SEQ ID NO: 28285

SEQ ID NO: 63307 - DNA, 46 bp, Homo Sapiens; identical to SEQ ID NO: 42261

SEQ ID NO: 63308 - DNA, 31 bp, Homo Sapiens; identical to SEQ ID NO: 28160

SEQ ID NO: 63309 - DNA, 47 bp, Homo Sapiens; identical to SEQ ID NO: 28142

SEQ ID NO: 63310 - DNA, 31 bp, Homo Sapiens; identical to SEQ ID NO: 27918

SEQ ID NO: 63311 - DNA, 25 bp, Homo Sapiens
tgggttcgaatcccaccgctgccac

SEQ ID NO: 63312 - DNA, 24 bp, Homo Sapiens
tggggattgtgggttcgagtccca

SEQ ID NO: 63313 - DNA, 19 bp, Homo Sapiens
tgggagagcattagactga

SEQ ID NO: 63314 - DNA, 41 bp, Homo Sapiens; identical to SEQ ID NO: 27766

SEQ ID NO: 63315 - DNA, 40 bp, Homo Sapiens; identical to SEQ ID NO: 27765

SEQ ID NO: 63316 - DNA, 38 bp, Homo Sapiens; identical to SEQ ID NO: 42022

SEQ ID NO: 63317 - DNA, 34 bp, Homo Sapiens; identical to SEQ ID NO: 27711

SEQ ID NO: 63318 - DNA, 32 bp, Homo Sapiens; identical to SEQ ID NO: 27710

SEQ ID NO: 63319 - DNA, 47 bp, Homo Sapiens; identical to SEQ ID NO: 41986

SEQ ID NO: 63320 - DNA, 47 bp, Homo Sapiens; identical to SEQ ID NO: 27672

SEQ ID NO: 63321 - DNA, 27 bp, Homo Sapiens
tgcaggttcgagtcctgccgcggtcgc

SEQ ID NO: 63322 - DNA, 40 bp, Homo Sapiens; identical to SEQ ID NO: 27445

SEQ ID NO: 63323 - DNA, 27 bp, Homo Sapiens
tgagggttcgagtcccttcgtggtcgc

SEQ ID NO: 63324 - DNA, 34 bp, Homo Sapiens; identical to SEQ ID NO: 27109

SEQ ID NO: 63325 - DNA, 34 bp, Homo Sapiens; identical to SEQ ID NO: 27101

SEQ ID NO: 63326 - DNA, 32 bp, Homo Sapiens; identical to SEQ ID NO: 27087

SEQ ID NO: 63327 - DNA, 38 bp, Homo Sapiens; identical to SEQ ID NO: 26993

SEQ ID NO: 63328 - DNA, 38 bp, Homo Sapiens; identical to SEQ ID NO: 26986

SEQ ID NO: 63329 - DNA, 43 bp, Homo Sapiens; identical to SEQ ID NO: 26961

SEQ ID NO: 63330 - DNA, 16 bp, Homo Sapiens
tctgcgttgtggccgc

SEQ ID NO: 63331 - DNA, 42 bp, Homo Sapiens; identical to SEQ ID NO: 26728

SEQ ID NO: 63332 - DNA, 41 bp, Homo Sapiens; identical to SEQ ID NO: 26727

SEQ ID NO: 63333 - DNA, 31 bp, Homo Sapiens; identical to SEQ ID NO: 26642

SEQ ID NO: 63334 - DNA, 18 bp, Homo Sapiens
tctagcggttaggattcc

SEQ ID NO: 63335 - DNA, 16 bp, Homo Sapiens
tctaaggcgctgcgtt

SEQ ID NO: 63336 - DNA, 28 bp, Homo Sapiens
tcgtgagttcgatcctcacacggggcac

SEQ ID NO: 63337 - DNA, 28 bp, Homo Sapiens
tcgctggttcgaatccggctcggaggac

SEQ ID NO: 63338 - DNA, 17 bp, Homo Sapiens
tcgattcccggccaacg

SEQ ID NO: 63339 - DNA, 17 bp, Homo Sapiens
tcgactcctggctggct

SEQ ID NO: 63340 - DNA, 16 bp, Homo Sapiens
tcctcgctggggcctc

SEQ ID NO: 63341 - DNA, 27 bp, Homo Sapiens
tccgggttcgagtcccggcggagtcgc

SEQ ID NO: 63342 - DNA, 41 bp, Homo Sapiens; identical to SEQ ID NO: 25797

SEQ ID NO: 63343 - DNA, 39 bp, Homo Sapiens; identical to SEQ ID NO: 25795

SEQ ID NO: 63344 - DNA, 38 bp, Homo Sapiens; identical to SEQ ID NO: 25794

SEQ ID NO: 63345 - DNA, 43 bp, Homo Sapiens; identical to SEQ ID NO: 41210

SEQ ID NO: 63346 - DNA, 26 bp, Homo Sapiens
tccgagttcaaatctcggtgggacct

SEQ ID NO: 63347 - DNA, 16 bp, Homo Sapiens
tcccggtcatggaacc

SEQ ID NO: 63348 - DNA, 16 bp, Homo Sapiens
tcccggtatgggaacc

SEQ ID NO: 63349 - DNA, 16 bp, Homo Sapiens
tcccggccactgcacc

SEQ ID NO: 63350 - DNA, 42 bp, Homo Sapiens; identical to SEQ ID NO: 25542

SEQ ID NO: 63351 - DNA, 38 bp, Homo Sapiens; identical to SEQ ID NO: 25513

SEQ ID NO: 63352 - DNA, 43 bp, Homo Sapiens; identical to SEQ ID NO: 41033

SEQ ID NO: 63353 - DNA, 44 bp, Homo Sapiens; identical to SEQ ID NO: 40981

SEQ ID NO: 63354 - DNA, 43 bp, Homo Sapiens; identical to SEQ ID NO: 40962

SEQ ID NO: 63355 - DNA, 39 bp, Homo Sapiens; identical to SEQ ID NO: 25320

SEQ ID NO: 63356 - DNA, 38 bp, Homo Sapiens; identical to SEQ ID NO: 40952

SEQ ID NO: 63357 - DNA, 16 bp, Homo Sapiens
tcagtctcataatctg

SEQ ID NO: 63358 - DNA, 20 bp, Homo Sapiens
tcaatcccgggtttcggcac

SEQ ID NO: 63359 - DNA, 19 bp, Homo Sapiens
tcaaatctcggtgggacct

SEQ ID NO: 63360 - DNA, 32 bp, Homo Sapiens; identical to SEQ ID NO: 40664

SEQ ID NO: 63361 - DNA, 27 bp, Homo Sapiens
tatggtctagcggttaggattcctggt

SEQ ID NO: 63362 - DNA, 28 bp, Homo Sapiens
tagtgtagtggttatcacgtctgcttta

SEQ ID NO: 63363 - DNA, 32 bp, Homo Sapiens; identical to SEQ ID NO: 24143

SEQ ID NO: 63364 - DNA, 33 bp, Homo Sapiens; identical to SEQ ID NO: 24136

SEQ ID NO: 63365 - DNA, 45 bp, Homo Sapiens; identical to SEQ ID NO: 23794

SEQ ID NO: 63366 - DNA, 19 bp, Homo Sapiens
taattcaaaggttccgggt

SEQ ID NO: 63367 - DNA, 40 bp, Homo Sapiens; identical to SEQ ID NO: 40244

SEQ ID NO: 63368 - DNA, 33 bp, Homo Sapiens; identical to SEQ ID NO: 40217

SEQ ID NO: 63369 - DNA, 34 bp, Homo Sapiens; identical to SEQ ID NO: 40216

SEQ ID NO: 63370 - DNA, 40 bp, Homo Sapiens; identical to SEQ ID NO: 22729

SEQ ID NO: 63371 - DNA, 40 bp, Homo Sapiens; identical to SEQ ID NO: 22682

SEQ ID NO: 63372 - DNA, 44 bp, Homo Sapiens; identical to SEQ ID NO: 22583

SEQ ID NO: 63373 - DNA, 37 bp, Homo Sapiens; identical to SEQ ID NO: 22466

SEQ ID NO: 63374 - DNA, 23 bp, Homo Sapiens
gttcgatcccgggcggaaacacc

SEQ ID NO: 63375 - DNA, 21 bp, Homo Sapiens
gttcaaatctcggtgggacct

SEQ ID NO: 63376 - DNA, 25 bp, Homo Sapiens
gtgttcgaatcacgtcggggtcacc

SEQ ID NO: 63377 - DNA, 25 bp, Homo Sapiens
gtgttcaaatcacgtcggggtcacc

SEQ ID NO: 63378 - DNA, 16 bp, Homo Sapiens
gtgtagtggtatcatg

SEQ ID NO: 63379 - DNA, 26 bp, Homo Sapiens
gtgggttcgagccccacgttgggcgc

SEQ ID NO: 63380 - DNA, 17 bp, Homo Sapiens
gtggcgcagcggaagcg

SEQ ID NO: 63381 - DNA, 31 bp, Homo Sapiens; identical to SEQ ID NO: 20855

SEQ ID NO: 63382 - DNA, 30 bp, Homo Sapiens; identical to SEQ ID NO: 20850

SEQ ID NO: 63383 - DNA, 29 bp, Homo Sapiens
gtcgctggttcgaatccggctcggaggac

SEQ ID NO: 63384 - DNA, 29 bp, Homo Sapiens
gtcgctggttcgaatccggctcgaaggac

SEQ ID NO: 63385 - DNA, 30 bp, Homo Sapiens; identical to SEQ ID NO: 20845

SEQ ID NO: 63386 - DNA, 28 bp, Homo Sapiens
gtcgcgggttcgatccccgtacgggcca

SEQ ID NO: 63387 - DNA, 29 bp, Homo Sapiens
gtcgcgagttcaaatctcgctggggcctc

SEQ ID NO: 63388 - DNA, 16 bp, Homo Sapiens
gtccctgtccaggcgc

SEQ ID NO: 63389 - DNA, 29 bp, Homo Sapiens
gtccctggttcgatcccgggtttcggcac

SEQ ID NO: 63390 - DNA, 23 bp, Homo Sapiens
gtatgattctcggtttgggtccg

SEQ ID NO: 63391 - DNA, 36 bp, Homo Sapiens; identical to SEQ ID NO: 20597

SEQ ID NO: 63392 - DNA, 43 bp, Homo Sapiens; identical to SEQ ID NO: 20163

SEQ ID NO: 63393 - DNA, 38 bp, Homo Sapiens; identical to SEQ ID NO: 39029

SEQ ID NO: 63394 - DNA, 31 bp, Homo Sapiens; identical to SEQ ID NO: 20118

SEQ ID NO: 63395 - DNA, 23 bp, Homo Sapiens
ggttcgattcctggtcagggaac

SEQ ID NO: 63396 - DNA, 38 bp, Homo Sapiens; identical to SEQ ID NO: 19939

SEQ ID NO: 63397 - DNA, 23 bp, Homo Sapiens
ggttcaatcccgggtttcggcac

SEQ ID NO: 63398 - DNA, 24 bp, Homo Sapiens
ggttcaaatcccggacgagccccc

SEQ ID NO: 63399 - DNA, 40 bp, Homo Sapiens; identical to SEQ ID NO: 19702

SEQ ID NO: 63400 - DNA, 31 bp, Homo Sapiens; identical to SEQ ID NO: 19407

SEQ ID NO: 63401 - DNA, 29 bp, Homo Sapiens
ggtcgcgggttcgatccccgtacgggcca

SEQ ID NO: 63402 - DNA, 41 bp, Homo Sapiens; identical to SEQ ID NO: 19368

SEQ ID NO: 63403 - DNA, 32 bp, Homo Sapiens; identical to SEQ ID NO: 19351

SEQ ID NO: 63404 - DNA, 19 bp, Homo Sapiens
ggtagctcagtcggtagag

SEQ ID NO: 63405 - DNA, 24 bp, Homo Sapiens
gggttcgattcccgggcggcgcac

SEQ ID NO: 63406 - DNA, 23 bp, Homo Sapiens
gggttcgattcccgggcggcgca

SEQ ID NO: 63407 - DNA, 22 bp, Homo Sapiens
gggttcgatccccgtacgggcc

SEQ ID NO: 63408 - DNA, 24 bp, Homo Sapiens
gggttcgaatcccaccgctgccac

SEQ ID NO: 63409 - DNA, 32 bp, Homo Sapiens; identical to SEQ ID NO: 18927

SEQ ID NO: 63410 - DNA, 31 bp, Homo Sapiens; identical to SEQ ID NO: 18926

SEQ ID NO: 63411 - DNA, 32 bp, Homo Sapiens; identical to SEQ ID NO: 38396

SEQ ID NO: 63412 - DNA, 32 bp, Homo Sapiens; identical to SEQ ID NO: 18838

SEQ ID NO: 63413 - DNA, 31 bp, Homo Sapiens; identical to SEQ ID NO: 38288

SEQ ID NO: 63414 - DNA, 33 bp, Homo Sapiens; identical to SEQ ID NO: 18635

SEQ ID NO: 63415 - DNA, 32 bp, Homo Sapiens; identical to SEQ ID NO: 18566

SEQ ID NO: 63416 - DNA, 31 bp, Homo Sapiens; identical to SEQ ID NO: 18561

SEQ ID NO: 63417 - DNA, 32 bp, Homo Sapiens; identical to SEQ ID NO: 49044

SEQ ID NO: 63418 - DNA, 30 bp, Homo Sapiens; identical to SEQ ID NO: 18559

SEQ ID NO: 63419 - DNA, 29 bp, Homo Sapiens
gggattgtgggttcgagtcccacccgggg

SEQ ID NO: 63420 - DNA, 18 bp, Homo Sapiens
gggagagcattagactga

SEQ ID NO: 63421 - DNA, 16 bp, Homo Sapiens
gggagagcattagact

SEQ ID NO: 63422 - DNA, 35 bp, Homo Sapiens; identical to SEQ ID NO: 18512

SEQ ID NO: 63423 - DNA, 36 bp, Homo Sapiens; identical to SEQ ID NO: 18431

SEQ ID NO: 63424 - DNA, 41 bp, Homo Sapiens; identical to SEQ ID NO: 18202

SEQ ID NO: 63425 - DNA, 40 bp, Homo Sapiens; identical to SEQ ID NO: 18201

SEQ ID NO: 63426 - DNA, 40 bp, Homo Sapiens; identical to SEQ ID NO: 17963

SEQ ID NO: 63427 - DNA, 46 bp, Homo Sapiens; identical to SEQ ID NO: 17813

SEQ ID NO: 63428 - DNA, 23 bp, Homo Sapiens
gcttagcggtagagcatttgact

SEQ ID NO: 63429 - DNA, 27 bp, Homo Sapiens
gctggttcgattccggctcgaaggacc

SEQ ID NO: 63430 - DNA, 26 bp, Homo Sapiens
gctggttcgaatccggctcggaggac

SEQ ID NO: 63431 - DNA, 26 bp, Homo Sapiens
gctggttcgaatccggctcgaaggac

SEQ ID NO: 63432 - DNA, 44 bp, Homo Sapiens; identical to SEQ ID NO: 17470

SEQ ID NO: 63433 - DNA, 26 bp, Homo Sapiens
gcgtgttcgaatcacgtcggggtcac

SEQ ID NO: 63434 - DNA, 25 bp, Homo Sapiens
gcgtgttcgaatcacgtcggggtca

SEQ ID NO: 63435 - DNA, 17 bp, Homo Sapiens
gcggcccgggttcgact

SEQ ID NO: 63436 - DNA, 17 bp, Homo Sapiens
gcctacccagggacgcc

SEQ ID NO: 63437 - DNA, 32 bp, Homo Sapiens; identical to SEQ ID NO: 16814

SEQ ID NO: 63438 - DNA, 30 bp, Homo Sapiens; identical to SEQ ID NO: 37434

SEQ ID NO: 63439 - DNA, 30 bp, Homo Sapiens; identical to SEQ ID NO: 16772

SEQ ID NO: 63440 - DNA, 41 bp, Homo Sapiens; identical to SEQ ID NO: 16680

SEQ ID NO: 63441 - DNA, 35 bp, Homo Sapiens; identical to SEQ ID NO: 16464

SEQ ID NO: 63442 - DNA, 33 bp, Homo Sapiens; identical to SEQ ID NO: 37211

SEQ ID NO: 63443 - DNA, 18 bp, Homo Sapiens
gattcccggccaatgcac

SEQ ID NO: 63444 - DNA, 36 bp, Homo Sapiens; identical to SEQ ID NO: 16007

SEQ ID NO: 63445 - DNA, 35 bp, Homo Sapiens; identical to SEQ ID NO: 37088

SEQ ID NO: 63446 - DNA, 18 bp, Homo Sapiens
gatcccgggcggaaacac

SEQ ID NO: 63447 - DNA, 17 bp, Homo Sapiens
gatccccgtacgggcca

SEQ ID NO: 63448 - DNA, 38 bp, Homo Sapiens; identical to SEQ ID NO: 15951

SEQ ID NO: 63449 - DNA, 39 bp, Homo Sapiens; identical to SEQ ID NO: 15929

SEQ ID NO: 63450 - DNA, 39 bp, Homo Sapiens; identical to SEQ ID NO: 15924

SEQ ID NO: 63451 - DNA, 24 bp, Homo Sapiens
gagttcaaatctcggtgggacctc

SEQ ID NO: 63452 - DNA, 23 bp, Homo Sapiens
gagttcaaatctcggtgggacct

SEQ ID NO: 63453 - DNA, 33 bp, Homo Sapiens
gaggtcccgggttcgatccccagcatctccacc

SEQ ID NO: 63454 - DNA, 32 bp, Homo Sapiens; identical to SEQ ID NO: 36975

SEQ ID NO: 63455 - DNA, 39 bp, Homo Sapiens; identical to SEQ ID NO: 15644

SEQ ID NO: 63456 - DNA, 18 bp, Homo Sapiens
gagcggtctaaggcgctg

SEQ ID NO: 63457 - DNA, 27 bp, Homo Sapiens
gagatgaaaacctttttccaaggacac

SEQ ID NO: 63458 - DNA, 19 bp, Homo Sapiens
gaatcctgttcgtgacgcc

SEQ ID NO: 63459 - DNA, 33 bp, Homo Sapiens; identical to SEQ ID NO: 15179

SEQ ID NO: 63460 - DNA, 33 bp, Homo Sapiens; identical to SEQ ID NO: 15098

SEQ ID NO: 63461 - DNA, 35 bp, Homo Sapiens; identical to SEQ ID NO: 36730

SEQ ID NO: 63462 - DNA, 35 bp, Homo Sapiens; identical to SEQ ID NO: 14991

SEQ ID NO: 63463 - DNA, 19 bp, Homo Sapiens
gaaaccgggcagaagcacc

SEQ ID NO: 63464 - DNA, 31 bp, Homo Sapiens; identical to SEQ ID NO: 14909

SEQ ID NO: 63465 - DNA, 37 bp, Homo Sapiens; identical to SEQ ID NO: 14763

SEQ ID NO: 63466 - DNA, 45 bp, Homo Sapiens; identical to SEQ ID NO: 14698

SEQ ID NO: 63467 - DNA, 44 bp, Homo Sapiens; identical to SEQ ID NO: 14668

SEQ ID NO: 63468 - DNA, 37 bp, Homo Sapiens; identical to SEQ ID NO: 36634

SEQ ID NO: 63469 - DNA, 17 bp, Homo Sapiens
cttccaagcagttgacc

SEQ ID NO: 63470 - DNA, 34 bp, Homo Sapiens; identical to SEQ ID NO: 14599

SEQ ID NO: 63471 - DNA, 34 bp, Homo Sapiens; identical to SEQ ID NO: 14594

SEQ ID NO: 63472 - DNA, 39 bp, Homo Sapiens; identical to SEQ ID NO: 14506

SEQ ID NO: 63473 - DNA, 43 bp, Homo Sapiens; identical to SEQ ID NO: 14363

SEQ ID NO: 63474 - DNA, 25 bp, Homo Sapiens
ctggttcgatcccgggtttcggcac

SEQ ID NO: 63475 - DNA, 26 bp, Homo Sapiens
ctgggttcgagccccagtggaaccac

SEQ ID NO: 63476 - DNA, 26 bp, Homo Sapiens
ctgggttcgaatcccagcggtgcctc

SEQ ID NO: 63477 - DNA, 39 bp, Homo Sapiens; identical to SEQ ID NO: 36386

SEQ ID NO: 63478 - DNA, 44 bp, Homo Sapiens; identical to SEQ ID NO: 36333

SEQ ID NO: 63479 - DNA, 44 bp, Homo Sapiens; identical to SEQ ID NO: 13630

SEQ ID NO: 63480 - DNA, 37 bp, Homo Sapiens; identical to SEQ ID NO: 13542

SEQ ID NO: 63481 - DNA, 31 bp, Homo Sapiens; identical to SEQ ID NO: 36198

SEQ ID NO: 63482 - DNA, 41 bp, Homo Sapiens; identical to SEQ ID NO: 13265

SEQ ID NO: 63483 - DNA, 41 bp, Homo Sapiens; identical to SEQ ID NO: 13263

SEQ ID NO: 63484 - DNA, 35 bp, Homo Sapiens; identical to SEQ ID NO: 13101

SEQ ID NO: 63485 - DNA, 33 bp, Homo Sapiens; identical to SEQ ID NO: 13099

SEQ ID NO: 63486 - DNA, 26 bp, Homo Sapiens
cgtgttcaaatcacgtcggggtcacc

SEQ ID NO: 63487 - DNA, 17 bp, Homo Sapiens
cgtggccgagcggtcta

SEQ ID NO: 63488 - DNA, 28 bp, Homo Sapiens
cgtagtgtagtggtcatcacgttcgcct

SEQ ID NO: 63489 - DNA, 25 bp, Homo Sapiens
cggttcgaaaccgggcggaaacacc

SEQ ID NO: 63490 - DNA, 22 bp, Homo Sapiens
cggttcgaaaccgggcggaaac

SEQ ID NO: 63491 - DNA, 28 bp, Homo Sapiens
cggttaggattcctggttttcacccagg

SEQ ID NO: 63492 - DNA, 19 bp, Homo Sapiens
cggtagagcatgagactct

SEQ ID NO: 63493 - DNA, 25 bp, Homo Sapiens
cgggttcgattcccgggcggcgcac

SEQ ID NO: 63494 - DNA, 25 bp, Homo Sapiens
cgggttcgatccccggcatctccac

SEQ ID NO: 63495 - DNA, 26 bp, Homo Sapiens
cgggttcgagtcccggcggagtcgcc

SEQ ID NO: 63496 - DNA, 24 bp, Homo Sapiens
cgggttcaaatcccggacgagccc

SEQ ID NO: 63497 - DNA, 26 bp, Homo Sapiens
cggggttcaagtccctgttcgggcgc

SEQ ID NO: 63498 - DNA, 33 bp, Homo Sapiens; identical to SEQ ID NO: 12622

SEQ ID NO: 63499 - DNA, 47 bp, Homo Sapiens; identical to SEQ ID NO: 12540

SEQ ID NO: 63500 - DNA, 31 bp, Homo Sapiens; identical to SEQ ID NO: 12468

SEQ ID NO: 63501 - DNA, 38 bp, Homo Sapiens; identical to SEQ ID NO: 12444

SEQ ID NO: 63502 - DNA, 36 bp, Homo Sapiens; identical to SEQ ID NO: 12442

SEQ ID NO: 63503 - DNA, 18 bp, Homo Sapiens
cggatagctcagtcggta

SEQ ID NO: 63504 - DNA, 27 bp, Homo Sapiens
cgctggttcgaatccggctcggaggac

SEQ ID NO: 63505 - DNA, 25 bp, Homo Sapiens
cgctggtgtagtggtatcatgcaag

SEQ ID NO: 63506 - DNA, 30 bp, Homo Sapiens; identical to SEQ ID NO: 12289

SEQ ID NO: 63507 - DNA, 29 bp, Homo Sapiens
cgcgggaggcccgggttcgattcccggcc

SEQ ID NO: 63508 - DNA, 37 bp, Homo Sapiens; identical to SEQ ID NO: 12157

SEQ ID NO: 63509 - DNA, 23 bp, Homo Sapiens
cgcagcggaagcgtgctgggccc

SEQ ID NO: 63510 - DNA, 28 bp, Homo Sapiens
cgcagaaggtcctgggttcgagccccag

SEQ ID NO: 63511 - DNA, 22 bp, Homo Sapiens
cgcaacggtagcgcgtctgact

SEQ ID NO: 63512 - DNA, 19 bp, Homo Sapiens
cgattcccggccaacgcac

SEQ ID NO: 63513 - DNA, 19 bp, Homo Sapiens
cgatccccgtacgggccac

SEQ ID NO: 63514 - DNA, 25 bp, Homo Sapiens
cgagttcgatcctcgctggggcctc

SEQ ID NO: 63515 - DNA, 20 bp, Homo Sapiens
cgagtcccttcgtggtcgcc

SEQ ID NO: 63516 - DNA, 18 bp, Homo Sapiens
cgagccccagtggaacca

SEQ ID NO: 63517 - DNA, 17 bp, Homo Sapiens
cgagccccagtggaacc

SEQ ID NO: 63518 - DNA, 18 bp, Homo Sapiens
cgaatctcggtgggacct

SEQ ID NO: 63519 - DNA, 19 bp, Homo Sapiens
cgaatcctgttcgtgacgc

SEQ ID NO: 63520 - DNA, 20 bp, Homo Sapiens
cgaatcccaccctcgtcgcc

SEQ ID NO: 63521 - DNA, 20 bp, Homo Sapiens
cgaatcccaccactgccacc

SEQ ID NO: 63522 - DNA, 20 bp, Homo Sapiens
cgaaccccgtacgggccacc

SEQ ID NO: 63523 - DNA, 36 bp, Homo Sapiens; identical to SEQ ID NO: 35415

SEQ ID NO: 63524 - DNA, 35 bp, Homo Sapiens
cgaaaggtccccggttcgatcccgggcggaaacac

SEQ ID NO: 63525 - DNA, 36 bp, Homo Sapiens; identical to SEQ ID NO: 11650

SEQ ID NO: 63526 - DNA, 17 bp, Homo Sapiens
cgaaaccgggcggaaac

SEQ ID NO: 63527 - DNA, 16 bp, Homo Sapiens
cgaaaccgggcggaaa

SEQ ID NO: 63528 - DNA, 18 bp, Homo Sapiens
cgaaaccgggcagaagca

SEQ ID NO: 63529 - DNA, 26 bp, Homo Sapiens
cctggttcaatcccgggtttcggcac

SEQ ID NO: 63530 - DNA, 45 bp, Homo Sapiens; identical to SEQ ID NO: 35291

SEQ ID NO: 63531 - DNA, 17 bp, Homo Sapiens
ccggttcgaaaccgggc

SEQ ID NO: 63532 - DNA, 22 bp, Homo Sapiens
ccgggttcgattcccgggcggc

SEQ ID NO: 63533 - DNA, 27 bp, Homo Sapiens
ccgggttcgatccccggcatctccacc

SEQ ID NO: 63534 - DNA, 28 bp, Homo Sapiens
ccggggttcaattccccgacggggagcc

SEQ ID NO: 63535 - DNA, 37 bp, Homo Sapiens; identical to SEQ ID NO: 11143

SEQ ID NO: 63536 - DNA, 28 bp, Homo Sapiens
ccgcgtggcctaatggataaggcgtctg

SEQ ID NO: 63537 - DNA, 25 bp, Homo Sapiens
ccgcggcccgggttcgattcccggt

SEQ ID NO: 63538 - DNA, 46 bp, Homo Sapiens; identical to SEQ ID NO: 11024

SEQ ID NO: 63539 - DNA, 47 bp, Homo Sapiens; identical to SEQ ID NO: 11019

SEQ ID NO: 63540 - DNA, 38 bp, Homo Sapiens; identical to SEQ ID NO: 35078

SEQ ID NO: 63541 - DNA, 36 bp, Homo Sapiens; identical to SEQ ID NO: 10935

SEQ ID NO: 63542 - DNA, 16 bp, Homo Sapiens
cccgggttcgactccc

SEQ ID NO: 63543 - DNA, 36 bp, Homo Sapiens; identical to SEQ ID NO: 10431

SEQ ID NO: 63544 - DNA, 37 bp, Homo Sapiens; identical to SEQ ID NO: 10338

SEQ ID NO: 63545 - DNA, 40 bp, Homo Sapiens; identical to SEQ ID NO: 10297

SEQ ID NO: 63546 - DNA, 35 bp, Homo Sapiens; identical to SEQ ID NO: 10172

SEQ ID NO: 63547 - DNA, 34 bp, Homo Sapiens; identical to SEQ ID NO: 10095

SEQ ID NO: 63548 - DNA, 38 bp, Homo Sapiens; identical to SEQ ID NO: 9967

SEQ ID NO: 63549 - DNA, 35 bp, Homo Sapiens; identical to SEQ ID NO: 9956

SEQ ID NO: 63550 - DNA, 38 bp, Homo Sapiens; identical to SEQ ID NO: 9926

SEQ ID NO: 63551 - DNA, 45 bp, Homo Sapiens; identical to SEQ ID NO: 9823

SEQ ID NO: 63552 - DNA, 44 bp, Homo Sapiens; identical to SEQ ID NO: 9822

SEQ ID NO: 63553 - DNA, 43 bp, Homo Sapiens; identical to SEQ ID NO: 9821

SEQ ID NO: 63554 - DNA, 36 bp, Homo Sapiens; identical to SEQ ID NO: 34490

SEQ ID NO: 63555 - DNA, 37 bp, Homo Sapiens; identical to SEQ ID NO: 9491

SEQ ID NO: 63556 - DNA, 29 bp, Homo Sapiens
catatggtctagcggttaggattcctggt

SEQ ID NO: 63557 - DNA, 27 bp, Homo Sapiens
catagtgtagtggttatcacgtctgct

SEQ ID NO: 63558 - DNA, 41 bp, Homo Sapiens; identical to SEQ ID NO: 9430

SEQ ID NO: 63559 - DNA, 21 bp, Homo Sapiens
cagttggttagagcgtggtgc

SEQ ID NO: 63560 - DNA, 43 bp, Homo Sapiens; identical to SEQ ID NO: 9261

SEQ ID NO: 63561 - DNA, 29 bp, Homo Sapiens
cagtcggtagagcatgagactcttaatct

SEQ ID NO: 63562 - DNA, 20 bp, Homo Sapiens
cagtcggtagagcataagac

SEQ ID NO: 63563 - DNA, 26 bp, Homo Sapiens
caggttcgaatcctgttcgtgacgcc

SEQ ID NO: 63564 - DNA, 35 bp, Homo Sapiens; identical to SEQ ID NO: 9089

SEQ ID NO: 63565 - DNA, 33 bp, Homo Sapiens; identical to SEQ ID NO: 9087

SEQ ID NO: 63566 - DNA, 34 bp, Homo Sapiens; identical to SEQ ID NO: 9059

SEQ ID NO: 63567 - DNA, 36 bp, Homo Sapiens; identical to SEQ ID NO: 9040

SEQ ID NO: 63568 - DNA, 25 bp, Homo Sapiens
caggcggcccgggttcgactcccgg

SEQ ID NO: 63569 - DNA, 21 bp, Homo Sapiens
caggcggcccgggttcgactc

SEQ ID NO: 63570 - DNA, 24 bp, Homo Sapiens
caggatggccgagtggtctaaggc

SEQ ID NO: 63571 - DNA, 33 bp, Homo Sapiens; identical to SEQ ID NO: 8807

SEQ ID NO: 63572 - DNA, 36 bp, Homo Sapiens; identical to SEQ ID NO: 8601

SEQ ID NO: 63573 - DNA, 36 bp, Homo Sapiens; identical to SEQ ID NO: 8583

SEQ ID NO: 63574 - DNA, 35 bp, Homo Sapiens; identical to SEQ ID NO: 8582

SEQ ID NO: 63575 - DNA, 33 bp, Homo Sapiens; identical to SEQ ID NO: 8581

SEQ ID NO: 63576 - DNA, 32 bp, Homo Sapiens; identical to SEQ ID NO: 8394

SEQ ID NO: 63577 - DNA, 32 bp, Homo Sapiens; identical to SEQ ID NO: 8204

SEQ ID NO: 63578 - DNA, 36 bp, Homo Sapiens; identical to SEQ ID NO: 8106

SEQ ID NO: 63579 - DNA, 39 bp, Homo Sapiens; identical to SEQ ID NO: 8030

SEQ ID NO: 63580 - DNA, 40 bp, Homo Sapiens; identical to SEQ ID NO: 7958

SEQ ID NO: 63581 - DNA, 21 bp, Homo Sapiens
caaatggtagagcgctcgctt

SEQ ID NO: 63582 - DNA, 18 bp, Homo Sapiens
caaatctcggtgggacct

SEQ ID NO: 63583 - DNA, 35 bp, Homo Sapiens; identical to SEQ ID NO: 7816

SEQ ID NO: 63584 - DNA, 30 bp, Homo Sapiens; identical to SEQ ID NO: 7630

SEQ ID NO: 63585 - DNA, 29 bp, Homo Sapiens
attgtgggttcgagtcccatctggggtgc

SEQ ID NO: 63586 - DNA, 42 bp, Homo Sapiens; identical to SEQ ID NO: 7620

SEQ ID NO: 63587 - DNA, 29 bp, Homo Sapiens
attgcaggttcgagtcctgccgcggtcgc

SEQ ID NO: 63588 - DNA, 30 bp, Homo Sapiens; identical to SEQ ID NO: 7470

SEQ ID NO: 63589 - DNA, 29 bp, Homo Sapiens
attgagggttcgaatcccttcgtggttgc

SEQ ID NO: 63590 - DNA, 17 bp, Homo Sapiens
attctcggtttgggtcc

SEQ ID NO: 63591 - DNA, 25 bp, Homo Sapiens
attcggcgctctcaccgccgcggcc

SEQ ID NO: 63592 - DNA, 17 bp, Homo Sapiens
attcggcgctctcaccg

SEQ ID NO: 63593 - DNA, 35 bp, Homo Sapiens; identical to SEQ ID NO: 7382

SEQ ID NO: 63594 - DNA, 17 bp, Homo Sapiens
attccctgacggggagc

SEQ ID NO: 63595 - DNA, 18 bp, Homo Sapiens
attcccgggcggcgcacc

SEQ ID NO: 63596 - DNA, 17 bp, Homo Sapiens
attcccggccaacgcac

SEQ ID NO: 63597 - DNA, 23 bp, Homo Sapiens
atggatcgaaaccatcctctgct

SEQ ID NO: 63598 - DNA, 35 bp, Homo Sapiens; identical to SEQ ID NO: 6796

SEQ ID NO: 63599 - DNA, 24 bp, Homo Sapiens
atgaaaacctttttccaaggacac

SEQ ID NO: 63600 - DNA, 39 bp, Homo Sapiens; identical to SEQ ID NO: 6682

SEQ ID NO: 63601 - DNA, 22 bp, Homo Sapiens
atctaaaccatcctctgctacc

SEQ ID NO: 63602 - DNA, 43 bp, Homo Sapiens; identical to SEQ ID NO: 6646

SEQ ID NO: 63603 - DNA, 20 bp, Homo Sapiens
atcgaaaccatcctctgcta

SEQ ID NO: 63604 - DNA, 28 bp, Homo Sapiens
atccgagttcaaatctcggtgggacctc

SEQ ID NO: 63605 - DNA, 17 bp, Homo Sapiens
atccccgtacgggccac

SEQ ID NO: 63606 - DNA, 47 bp, Homo Sapiens; identical to SEQ ID NO: 6484

SEQ ID NO: 63607 - DNA, 47 bp, Homo Sapiens; identical to SEQ ID NO: 6455

SEQ ID NO: 63608 - DNA, 38 bp, Homo Sapiens; identical to SEQ ID NO: 6354

SEQ ID NO: 63609 - DNA, 36 bp, Homo Sapiens; identical to SEQ ID NO: 6352

SEQ ID NO: 63610 - DNA, 38 bp, Homo Sapiens; identical to SEQ ID NO: 6336

SEQ ID NO: 63611 - DNA, 37 bp, Homo Sapiens; identical to SEQ ID NO: 6335

SEQ ID NO: 63612 - DNA, 32 bp, Homo Sapiens; identical to SEQ ID NO: 6228

SEQ ID NO: 63613 - DNA, 38 bp, Homo Sapiens; identical to SEQ ID NO: 6160

SEQ ID NO: 63614 - DNA, 41 bp, Homo Sapiens; identical to SEQ ID NO: 5967

SEQ ID NO: 63615 - DNA, 18 bp, Homo Sapiens
agtggcgcagcggaagcg

SEQ ID NO: 63616 - DNA, 18 bp, Homo Sapiens
agtccctgttcgggcgcc

SEQ ID NO: 63617 - DNA, 17 bp, Homo Sapiens
agtccctgttcgggcgc

SEQ ID NO: 63618 - DNA, 17 bp, Homo Sapiens
agtcccggcggagtcgc

SEQ ID NO: 63619 - DNA, 32 bp, Homo Sapiens; identical to SEQ ID NO: 5257

SEQ ID NO: 63620 - DNA, 20 bp, Homo Sapiens
aggttcgactcctggctggc

SEQ ID NO: 63621 - DNA, 31 bp, Homo Sapiens; identical to SEQ ID NO: 5228

SEQ ID NO: 63622 - DNA, 33 bp, Homo Sapiens; identical to SEQ ID NO: 5217

SEQ ID NO: 63623 - DNA, 18 bp, Homo Sapiens
aggtcgtgagttcgagcc

SEQ ID NO: 63624 - DNA, 32 bp, Homo Sapiens; identical to SEQ ID NO: 5167

SEQ ID NO: 63625 - DNA, 31 bp, Homo Sapiens; identical to SEQ ID NO: 5166

SEQ ID NO: 63626 - DNA, 31 bp, Homo Sapiens; identical to SEQ ID NO: 5138

SEQ ID NO: 63627 - DNA, 32 bp, Homo Sapiens; identical to SEQ ID NO: 5134

SEQ ID NO: 63628 - DNA, 32 bp, Homo Sapiens; identical to SEQ ID NO: 32760

SEQ ID NO: 63629 - DNA, 26 bp, Homo Sapiens
agggttcaagtccctgttcgggcgcc

SEQ ID NO: 63630 - DNA, 33 bp, Homo Sapiens; identical to SEQ ID NO: 5063

SEQ ID NO: 63631 - DNA, 35 bp, Homo Sapiens; identical to SEQ ID NO: 5027

SEQ ID NO: 63632 - DNA, 34 bp, Homo Sapiens; identical to SEQ ID NO: 5026

SEQ ID NO: 63633 - DNA, 33 bp, Homo Sapiens; identical to SEQ ID NO: 5016

SEQ ID NO: 63634 - DNA, 27 bp, Homo Sapiens
aggcggcccgggttcgactcccggtgt

SEQ ID NO: 63635 - DNA, 24 bp, Homo Sapiens
aggcggcccgggttcgactcccgg

SEQ ID NO: 63636 - DNA, 24 bp, Homo Sapiens
aggactgtagatccttaggtcgct

SEQ ID NO: 63637 - DNA, 32 bp, Homo Sapiens
agcggttaggattcctggttttcacccaggtg

SEQ ID NO: 63638 - DNA, 29 bp, Homo Sapiens
agcggttaggattcctggttttcacccag

SEQ ID NO: 63639 - DNA, 21 bp, Homo Sapiens
agcggaagcgtgctgggccca

SEQ ID NO: 63640 - DNA, 17 bp, Homo Sapiens
agccccagtggaaccac

SEQ ID NO: 63641 - DNA, 19 bp, Homo Sapiens
agcatgggactcttcatcc

SEQ ID NO: 63642 - DNA, 18 bp, Homo Sapiens
agcatgagactcttaatc

SEQ ID NO: 63643 - DNA, 29 bp, Homo Sapiens
agattgcaggttcgagtcctgccgcggtc

SEQ ID NO: 63644 - DNA, 31 bp, Homo Sapiens; identical to SEQ ID NO: 4116

SEQ ID NO: 63645 - DNA, 26 bp, Homo Sapiens
agatgaaaacctttttccaaggacac

SEQ ID NO: 63646 - DNA, 35 bp, Homo Sapiens
agaggtcgatggatcgaaaccatcctctgctacca

SEQ ID NO: 63647 - DNA, 31 bp, Homo Sapiens; identical to SEQ ID NO: 3852

SEQ ID NO: 63648 - DNA, 34 bp, Homo Sapiens; identical to SEQ ID NO: 32295

SEQ ID NO: 63649 - DNA, 32 bp, Homo Sapiens; identical to SEQ ID NO: 3777

SEQ ID NO: 63650 - DNA, 35 bp, Homo Sapiens; identical to SEQ ID NO: 3731

SEQ ID NO: 63651 - DNA, 34 bp, Homo Sapiens; identical to SEQ ID NO: 3730

SEQ ID NO: 63652 - DNA, 45 bp, Homo Sapiens; identical to SEQ ID NO: 32206

SEQ ID NO: 63653 - DNA, 42 bp, Homo Sapiens
actctgaatccagcgatccgagttcaaatctcggtggaacct

SEQ ID NO: 63654 - DNA, 30 bp, Homo Sapiens; identical to SEQ ID NO: 3185

SEQ ID NO: 63655 - DNA, 28 bp, Homo Sapiens
accggggttcaattccccgacggggagc

SEQ ID NO: 63656 - DNA, 28 bp, Homo Sapiens
acccgggttcgattcccgggcggcgcac

SEQ ID NO: 63657 - DNA, 16 bp, Homo Sapiens
accccgtacgggccac

SEQ ID NO: 63658 - DNA, 43 bp, Homo Sapiens; identical to SEQ ID NO: 2831

SEQ ID NO: 63659 - DNA, 31 bp, Homo Sapiens; identical to SEQ ID NO: 2705

SEQ ID NO: 63660 - DNA, 19 bp, Homo Sapiens
aattccccgacggggagcc

SEQ ID NO: 63661 - DNA, 39 bp, Homo Sapiens; identical to SEQ ID NO: 2341

SEQ ID NO: 63662 - DNA, 16 bp, Homo Sapiens
aatctcggtgggacct

SEQ ID NO: 63663 - DNA, 18 bp, Homo Sapiens
aatctcgctggggcctcc

SEQ ID NO: 63664 - DNA, 17 bp, Homo Sapiens
aatctcgctggggcctc

SEQ ID NO: 63665 - DNA, 16 bp, Homo Sapiens
aatctcgctggggcct

SEQ ID NO: 63666 - DNA, 39 bp, Homo Sapiens; identical to SEQ ID NO: 1989

SEQ ID NO: 63667 - DNA, 16 bp, Homo Sapiens
aatcccaccgctgcca

SEQ ID NO: 63668 - DNA, 19 bp, Homo Sapiens
aagtccctgttcgggcgcc

SEQ ID NO: 63669 - DNA, 33 bp, Homo Sapiens; identical to SEQ ID NO: 1670

SEQ ID NO: 63670 - DNA, 32 bp, Homo Sapiens; identical to SEQ ID NO: 1653

SEQ ID NO: 63671 - DNA, 33 bp, Homo Sapiens; identical to SEQ ID NO: 1645

SEQ ID NO: 63672 - DNA, 32 bp, Homo Sapiens; identical to SEQ ID NO: 1634

SEQ ID NO: 63673 - DNA, 32 bp, Homo Sapiens; identical to SEQ ID NO: 1633

SEQ ID NO: 63674 - DNA, 31 bp, Homo Sapiens; identical to SEQ ID NO: 31607

SEQ ID NO: 63675 - DNA, 30 bp, Homo Sapiens; identical to SEQ ID NO: 1632

SEQ ID NO: 63676 - DNA, 33 bp, Homo Sapiens; identical to SEQ ID NO: 1576

SEQ ID NO: 63677 - DNA, 27 bp, Homo Sapiens
aagcagcttcaaacctgccggggcttc

SEQ ID NO: 63678 - DNA, 34 bp, Homo Sapiens; identical to SEQ ID NO: 1380

SEQ ID NO: 63679 - DNA, 32 bp, Homo Sapiens; identical to SEQ ID NO: 1378

SEQ ID NO: 63680 - DNA, 32 bp, Homo Sapiens; identical to SEQ ID NO: 1371

SEQ ID NO: 63681 - DNA, 33 bp, Homo Sapiens; identical to SEQ ID NO: 1365

SEQ ID NO: 63682 - DNA, 33 bp, Homo Sapiens; identical to SEQ ID NO: 1362

SEQ ID NO: 63683 - DNA, 16 bp, Homo Sapiens
aaccgggcagaaacac

SEQ ID NO: 63684 - DNA, 17 bp, Homo Sapiens
aaccccgtccgtgcctc

SEQ ID NO: 63685 - DNA, 16 bp, Homo Sapiens
aaccaggcggaaacac

SEQ ID NO: 63686 - DNA, 17 bp, Homo Sapiens
aaatctcggtgggacct

SEQ ID NO: 63687 - DNA, 34 bp, Homo Sapiens; identical to SEQ ID NO: 455

SEQ ID NO: 63688 - DNA, 33 bp, Homo Sapiens; identical to SEQ ID NO: 444

SEQ ID NO: 63689 - DNA, 33 bp, Homo Sapiens; identical to SEQ ID NO: 31309

SEQ ID NO: 63690 - DNA, 32 bp, Homo Sapiens; identical to SEQ ID NO: 31308

SEQ ID NO: 63691 - DNA, 18 bp, Homo Sapiens
aaaccgggcagaagcacc

SEQ ID NO: 63692 - DNA, 37 bp, Homo Sapiens; identical to SEQ ID NO: 30923

SEQ ID NO: 63693 - DNA, 42 bp, Homo Sapiens; identical to SEQ ID NO: 43037

SEQ ID NO: 63694 - DNA, 45 bp, Homo Sapiens; identical to SEQ ID NO: 42950

SEQ ID NO: 63695 - DNA, 43 bp, Homo Sapiens; identical to SEQ ID NO: 42929

SEQ ID NO: 63696 - DNA, 18 bp, Homo Sapiens
ttcgattcccggccaacg

SEQ ID NO: 63697 - DNA, 36 bp, Homo Sapiens; identical to SEQ ID NO: 29983

SEQ ID NO: 63698 - DNA, 35 bp, Homo Sapiens; identical to SEQ ID NO: 29703

SEQ ID NO: 63699 - DNA, 40 bp, Homo Sapiens; identical to SEQ ID NO: 29529

SEQ ID NO: 63700 - DNA, 36 bp, Homo Sapiens; identical to SEQ ID NO: 42660

SEQ ID NO: 63701 - DNA, 36 bp, Homo Sapiens; identical to SEQ ID NO: 42451

SEQ ID NO: 63702 - DNA, 41 bp, Homo Sapiens; identical to SEQ ID NO: 28550

SEQ ID NO: 63703 - DNA, 36 bp, Homo Sapiens; identical to SEQ ID NO: 28541

SEQ ID NO: 63704 - DNA, 33 bp, Homo Sapiens; identical to SEQ ID NO: 28279

SEQ ID NO: 63705 - DNA, 45 bp, Homo Sapiens; identical to SEQ ID NO: 28045

SEQ ID NO: 63706 - DNA, 21 bp, Homo Sapiens
tgggttcgaatcccagcggtg

SEQ ID NO: 63707 - DNA, 24 bp, Homo Sapiens
tggggattgtgggttcgagtccca

SEQ ID NO: 63708 - DNA, 38 bp, Homo Sapiens; identical to SEQ ID NO: 27496

SEQ ID NO: 63709 - DNA, 35 bp, Homo Sapiens; identical to SEQ ID NO: 26879

SEQ ID NO: 63710 - DNA, 36 bp, Homo Sapiens; identical to SEQ ID NO: 26872

SEQ ID NO: 63711 - DNA, 36 bp, Homo Sapiens; identical to SEQ ID NO: 26864

SEQ ID NO: 63712 - DNA, 35 bp, Homo Sapiens; identical to SEQ ID NO: 26797

SEQ ID NO: 63713 - DNA, 36 bp, Homo Sapiens; identical to SEQ ID NO: 26773

SEQ ID NO: 63714 - DNA, 35 bp, Homo Sapiens; identical to SEQ ID NO: 26765

SEQ ID NO: 63715 - DNA, 17 bp, Homo Sapiens
tcgattcccggccaacg

SEQ ID NO: 63716 - DNA, 20 bp, Homo Sapiens
tcgagtcccttcgtggtcgc

SEQ ID NO: 63717 - DNA, 20 bp, Homo Sapiens
tcgaatcctgttcgtgacgc

SEQ ID NO: 63718 - DNA, 35 bp, Homo Sapiens; identical to SEQ ID NO: 25745

SEQ ID NO: 63719 - DNA, 43 bp, Homo Sapiens; identical to SEQ ID NO: 41033

SEQ ID NO: 63720 - DNA, 16 bp, Homo Sapiens
tcaggatggccgagtg

SEQ ID NO: 63721 - DNA, 33 bp, Homo Sapiens; identical to SEQ ID NO: 24951

SEQ ID NO: 63722 - DNA, 36 bp, Homo Sapiens; identical to SEQ ID NO: 24723

SEQ ID NO: 63723 - DNA, 35 bp, Homo Sapiens; identical to SEQ ID NO: 24722

SEQ ID NO: 63724 - DNA, 35 bp, Homo Sapiens; identical to SEQ ID NO: 24649

SEQ ID NO: 63725 - DNA, 36 bp, Homo Sapiens; identical to SEQ ID NO: 24647

SEQ ID NO: 63726 - DNA, 35 bp, Homo Sapiens; identical to SEQ ID NO: 24646

SEQ ID NO: 63727 - DNA, 34 bp, Homo Sapiens; identical to SEQ ID NO: 24642

SEQ ID NO: 63728 - DNA, 32 bp, Homo Sapiens; identical to SEQ ID NO: 24640

SEQ ID NO: 63729 - DNA, 47 bp, Homo Sapiens; identical to SEQ ID NO: 24606

SEQ ID NO: 63730 - DNA, 27 bp, Homo Sapiens
tatggtctagcggttaggattcctggt

SEQ ID NO: 63731 - DNA, 35 bp, Homo Sapiens; identical to SEQ ID NO: 24531

SEQ ID NO: 63732 - DNA, 42 bp, Homo Sapiens; identical to SEQ ID NO: 24266

SEQ ID NO: 63733 - DNA, 16 bp, Homo Sapiens
tagagcatttgactgc

SEQ ID NO: 63734 - DNA, 25 bp, Homo Sapiens
gtgttcaagtcacgtcggggtcacc

SEQ ID NO: 63735 - DNA, 33 bp, Homo Sapiens; identical to SEQ ID NO: 39346

SEQ ID NO: 63736 - DNA, 30 bp, Homo Sapiens; identical to SEQ ID NO: 20845

SEQ ID NO: 63737 - DNA, 40 bp, Homo Sapiens; identical to SEQ ID NO: 20625

SEQ ID NO: 63738 - DNA, 36 bp, Homo Sapiens; identical to SEQ ID NO: 20597

SEQ ID NO: 63739 - DNA, 35 bp, Homo Sapiens; identical to SEQ ID NO: 20587

SEQ ID NO: 63740 - DNA, 34 bp, Homo Sapiens; identical to SEQ ID NO: 20393

SEQ ID NO: 63741 - DNA, 29 bp, Homo Sapiens
ggtccccggttcgaaaccgggcggaaaca

SEQ ID NO: 63742 - DNA, 22 bp, Homo Sapiens
gggttcgattcccggtcaggaa

SEQ ID NO: 63743 - DNA, 24 bp, Homo Sapiens
gggttcgaatcccaccgctgccac

SEQ ID NO: 63744 - DNA, 24 bp, Homo Sapiens
gggttcaagtccctgtccaggcgc

SEQ ID NO: 63745 - DNA, 26 bp, Homo Sapiens
gggttagagcactggtcttgtaaacc

SEQ ID NO: 63746 - DNA, 33 bp, Homo Sapiens; identical to SEQ ID NO: 38314

SEQ ID NO: 63747 - DNA, 17 bp, Homo Sapiens
ggagagcattagactga

SEQ ID NO: 63748 - DNA, 24 bp, Homo Sapiens
gcggaagcgtgctgggcccataac

SEQ ID NO: 63749 - DNA, 32 bp, Homo Sapiens; identical to SEQ ID NO: 60131

SEQ ID NO: 63750 - DNA, 28 bp, Homo Sapiens
gcgatccgagttcaaatctcggtgggac

SEQ ID NO: 63751 - DNA, 28 bp, Homo Sapiens
gcgatccgagttcaaatctcggtggaac

SEQ ID NO: 63752 - DNA, 41 bp, Homo Sapiens; identical to SEQ ID NO: 16680

SEQ ID NO: 63753 - DNA, 26 bp, Homo Sapiens
gcaggttcgagtcctgccgcggtcgc

SEQ ID NO: 63754 - DNA, 36 bp, Homo Sapiens; identical to SEQ ID NO: 15942

SEQ ID NO: 63755 - DNA, 33 bp, Homo Sapiens; identical to SEQ ID NO: 36976

SEQ ID NO: 63756 - DNA, 19 bp, Homo Sapiens
gagcctcacctggagcacc

SEQ ID NO: 63757 - DNA, 46 bp, Homo Sapiens; identical to SEQ ID NO: 15458

SEQ ID NO: 63758 - DNA, 34 bp, Homo Sapiens; identical to SEQ ID NO: 36723

SEQ ID NO: 63759 - DNA, 37 bp, Homo Sapiens; identical to SEQ ID NO: 14763

SEQ ID NO: 63760 - DNA, 33 bp, Homo Sapiens; identical to SEQ ID NO: 47748

SEQ ID NO: 63761 - DNA, 37 bp, Homo Sapiens; identical to SEQ ID NO: 36634

SEQ ID NO: 63762 - DNA, 46 bp, Homo Sapiens; identical to SEQ ID NO: 14304

SEQ ID NO: 63763 - DNA, 44 bp, Homo Sapiens; identical to SEQ ID NO: 36502

SEQ ID NO: 63764 - DNA, 43 bp, Homo Sapiens; identical to SEQ ID NO: 36499

SEQ ID NO: 63765 - DNA, 35 bp, Homo Sapiens; identical to SEQ ID NO: 14222

SEQ ID NO: 63766 - DNA, 36 bp, Homo Sapiens; identical to SEQ ID NO: 36067

SEQ ID NO: 63767 - DNA, 25 bp, Homo Sapiens
cgggttcgattcccggtcaggaaac

SEQ ID NO: 63768 - DNA, 31 bp, Homo Sapiens; identical to SEQ ID NO: 12580

SEQ ID NO: 63769 - DNA, 38 bp, Homo Sapiens; identical to SEQ ID NO: 12444

SEQ ID NO: 63770 - DNA, 29 bp, Homo Sapiens
cgcgggaggcccgggttcgattcccggcc

SEQ ID NO: 63771 - DNA, 22 bp, Homo Sapiens
cgcaatggtagcgcgtctgact

SEQ ID NO: 63772 - DNA, 19 bp, Homo Sapiens
cgattcccggccaacgcac

SEQ ID NO: 63773 - DNA, 35 bp, Homo Sapiens
cgaaaggttggtggttcgatcccacccagggacgc

SEQ ID NO: 63774 - DNA, 34 bp, Homo Sapiens; identical to SEQ ID NO: 35413

SEQ ID NO: 63775 - DNA, 17 bp, Homo Sapiens
cgaaaccgggcggaaac

SEQ ID NO: 63776 - DNA, 19 bp, Homo Sapiens
cgaaaccgggcagaagcac

SEQ ID NO: 63777 - DNA, 38 bp, Homo Sapiens; identical to SEQ ID NO: 11172

SEQ ID NO: 63778 - DNA, 36 bp, Homo Sapiens; identical to SEQ ID NO: 10916

SEQ ID NO: 63779 - DNA, 17 bp, Homo Sapiens
cccatatggtctagcgg

SEQ ID NO: 63780 - DNA, 29 bp, Homo Sapiens
cccaggcggcccgggttcgactcccggtg

SEQ ID NO: 63781 - DNA, 38 bp, Homo Sapiens; identical to SEQ ID NO: 9967

SEQ ID NO: 63782 - DNA, 23 bp, Homo Sapiens
cataatctgaaggtcctgagttc

SEQ ID NO: 63783 - DNA, 42 bp, Homo Sapiens; identical to SEQ ID NO: 9260

SEQ ID NO: 63784 - DNA, 35 bp, Homo Sapiens; identical to SEQ ID NO: 9089

SEQ ID NO: 63785 - DNA, 34 bp, Homo Sapiens; identical to SEQ ID NO: 9088

SEQ ID NO: 63786 - DNA, 47 bp, Homo Sapiens; identical to SEQ ID NO: 8720

SEQ ID NO: 63787 - DNA, 28 bp, Homo Sapiens
cagaggtcgatggatcgaaaccatcctc

SEQ ID NO: 63788 - DNA, 33 bp, Homo Sapiens; identical to SEQ ID NO: 8581

SEQ ID NO: 63789 - DNA, 35 bp, Homo Sapiens; identical to SEQ ID NO: 33804

SEQ ID NO: 63790 - DNA, 34 bp, Homo Sapiens; identical to SEQ ID NO: 8012

SEQ ID NO: 63791 - DNA, 35 bp, Homo Sapiens; identical to SEQ ID NO: 8007

SEQ ID NO: 63792 - DNA, 34 bp, Homo Sapiens; identical to SEQ ID NO: 8006

SEQ ID NO: 63793 - DNA, 37 bp, Homo Sapiens; identical to SEQ ID NO: 6717

SEQ ID NO: 63794 - DNA, 36 bp, Homo Sapiens; identical to SEQ ID NO: 6716

SEQ ID NO: 63795 - DNA, 37 bp, Homo Sapiens; identical to SEQ ID NO: 6703

SEQ ID NO: 63796 - DNA, 35 bp, Homo Sapiens; identical to SEQ ID NO: 5548

SEQ ID NO: 63797 - DNA, 31 bp, Homo Sapiens; identical to SEQ ID NO: 32843

SEQ ID NO: 63798 - DNA, 18 bp, Homo Sapiens
aggtcgtgagttcgagcc

SEQ ID NO: 63799 - DNA, 32 bp, Homo Sapiens; identical to SEQ ID NO: 32760

SEQ ID NO: 63800 - DNA, 30 bp, Homo Sapiens; identical to SEQ ID NO: 5130

SEQ ID NO: 63801 - DNA, 27 bp, Homo Sapiens
aggcggcccgggttcgactcccggtgt

SEQ ID NO: 63802 - DNA, 35 bp, Homo Sapiens; identical to SEQ ID NO: 4530

SEQ ID NO: 63803 - DNA, 19 bp, Homo Sapiens
agcatgggactcttcatcc

SEQ ID NO: 63804 - DNA, 16 bp, Homo Sapiens
actcccggtatgggaa

SEQ ID NO: 63805 - DNA, 25 bp, Homo Sapiens
acgggttcgaaccccgtccgtgcct

SEQ ID NO: 63806 - DNA, 35 bp, Homo Sapiens; identical to SEQ ID NO: 2793

SEQ ID NO: 63807 - DNA, 31 bp, Homo Sapiens; identical to SEQ ID NO: 2705

SEQ ID NO: 63808 - DNA, 33 bp, Homo Sapiens; identical to SEQ ID NO: 1674

SEQ ID NO: 63809 - DNA, 33 bp, Homo Sapiens; identical to SEQ ID NO: 1664

SEQ ID NO: 63810 - DNA, 30 bp, Homo Sapiens; identical to SEQ ID NO: 1632

SEQ ID NO: 63811 - DNA, 16 bp, Homo Sapiens
aaaccgggcagaagca

SEQ ID NO: 63812 - DNA, 29 bp, Homo Sapiens
aaaatgttggttatacccttcccgtacta

SEQ ID NO: 63813 - DNA, 16 bp, Homo Sapiens
tcgaatcccagcggtg

SEQ ID NO: 63814 - DNA, 32 bp, Homo Sapiens; identical to SEQ ID NO: 24960

SEQ ID NO: 63815 - DNA, 44 bp, Homo Sapiens; identical to SEQ ID NO: 21494

SEQ ID NO: 63816 - DNA, 35 bp, Homo Sapiens; identical to SEQ ID NO: 18456

SEQ ID NO: 63817 - DNA, 33 bp, Homo Sapiens; identical to SEQ ID NO: 18241

SEQ ID NO: 63818 - DNA, 32 bp, Homo Sapiens; identical to SEQ ID NO: 14988

SEQ ID NO: 63819 - DNA, 21 bp, Homo Sapiens
cgggttcgattcccgggcggc

SEQ ID NO: 63820 - DNA, 26 bp, Homo Sapiens
cgggagaccggggttcgattccccga

SEQ ID NO: 63821 - DNA, 33 bp, Homo Sapiens; identical to SEQ ID NO: 12208

SEQ ID NO: 63822 - DNA, 35 bp, Homo Sapiens; identical to SEQ ID NO: 9709

SEQ ID NO: 63823 - DNA, 22 bp, Homo Sapiens
cagcggaagcgtgctgggccca

SEQ ID NO: 63824 - DNA, 28 bp, Homo Sapiens
attgtgggttcgagtcccatctggggtg

SEQ ID NO: 63825 - DNA, 25 bp, Homo Sapiens
atgctttgcacgtatgaggccccgg

SEQ ID NO: 63826 - DNA, 24 bp, Homo Sapiens
atgaaaacctttttccaaggacac

SEQ ID NO: 63827 - DNA, 39 bp, Homo Sapiens; identical to SEQ ID NO: 5552

SEQ ID NO: 63828 - DNA, 36 bp, Homo Sapiens; identical to SEQ ID NO: 3780

SEQ ID NO: 63829 - DNA, 33 bp, Homo Sapiens; identical to SEQ ID NO: 12208

SEQ ID NO: 63830 - DNA, 34 bp, Homo Sapiens; identical to SEQ ID NO: 9102

SEQ ID NO: 63831 - DNA, 23 bp, Homo Sapiens
attcccattcttgcgacccgggt

SEQ ID NO: 63832 - DNA, 31 bp, Homo Sapiens; identical to SEQ ID NO: 5228

SEQ ID NO: 63833 - DNA, 34 bp, Homo Sapiens; identical to SEQ ID NO: 5022

SEQ ID NO: 63834 - DNA, 32 bp, Homo Sapiens; identical to SEQ ID NO: 4484

SEQ ID NO: 63835 - DNA, 32 bp, Homo Sapiens; identical to SEQ ID NO: 3777

SEQ ID NO: 63836 - DNA, 36 bp, Homo Sapiens; identical to SEQ ID NO: 9965

SEQ ID NO: 63837 - DNA, 38 bp, Homo Sapiens; identical to SEQ ID NO: 7865

SEQ ID NO: 63838 - DNA, 47 bp, Homo Sapiens; identical to SEQ ID NO: 30476

SEQ ID NO: 63839 - DNA, 46 bp, Homo Sapiens; identical to SEQ ID NO: 30475

SEQ ID NO: 63840 - DNA, 24 bp, Homo Sapiens
ttgattagggtgcttagctgttaa

SEQ ID NO: 63841 - DNA, 43 bp, Homo Sapiens; identical to SEQ ID NO: 28347

SEQ ID NO: 63842 - DNA, 34 bp, Homo Sapiens; identical to SEQ ID NO: 26677

SEQ ID NO: 63843 - DNA, 19 bp, Homo Sapiens
tcgaatcccagcggggcct

SEQ ID NO: 63844 - DNA, 43 bp, Homo Sapiens; identical to SEQ ID NO: 21543

SEQ ID NO: 63845 - DNA, 46 bp, Homo Sapiens; identical to SEQ ID NO: 12319

SEQ ID NO: 63846 - DNA, 17 bp, Homo Sapiens
cgagccccagtggaacc

SEQ ID NO: 63847 - DNA, 32 bp, Homo Sapiens; identical to SEQ ID NO: 11629

SEQ ID NO: 63848 - DNA, 27 bp, Homo Sapiens
cagaggcttacgaccccttatttaccc

SEQ ID NO: 63849 - DNA, 38 bp, Homo Sapiens; identical to SEQ ID NO: 7865

SEQ ID NO: 63850 - DNA, 30 bp, Homo Sapiens; identical to SEQ ID NO: 1566

SEQ ID NO: 63851 - DNA, 19 bp, Homo Sapiens
aaaaattttggtgcaactc

SEQ ID NO: 63852 - DNA, 20 bp, Homo Sapiens
aaaaattttggtgcaactcc

SEQ ID NO: 63853 - DNA, 21 bp, Homo Sapiens
aaaaattttggtgcaactcca

SEQ ID NO: 63854 - DNA, 24 bp, Homo Sapiens
aaaaattttggtgcaactccaaat

SEQ ID NO: 63855 - DNA, 25 bp, Homo Sapiens
aaaaattttggtgcaactccaaata

SEQ ID NO: 63856 - DNA, 16 bp, Homo Sapiens
aaaacatcagattgtg

SEQ ID NO: 63857 - DNA, 17 bp, Homo Sapiens
aaaacatcagattgtga

SEQ ID NO: 63858 - DNA, 18 bp, Homo Sapiens
aaaacatcagattgtgaa

SEQ ID NO: 63859 - DNA, 19 bp, Homo Sapiens
aaaacatcagattgtgaat

SEQ ID NO: 63860 - DNA, 20 bp, Homo Sapiens
aaaacatcagattgtgaatc

SEQ ID NO: 63861 - DNA, 21 bp, Homo Sapiens
aaaacatcagattgtgaatct

SEQ ID NO: 63862 - DNA, 23 bp, Homo Sapiens
aaaacatcagattgtgaatctga

SEQ ID NO: 63863 - DNA, 24 bp, Homo Sapiens
aaaacatcagattgtgaatctgac

SEQ ID NO: 63864 - DNA, 25 bp, Homo Sapiens
aaaacatcagattgtgaatctgaca

SEQ ID NO: 63865 - DNA, 22 bp, Homo Sapiens
aaaacctttttccaaggacacc

SEQ ID NO: 63866 - DNA, 23 bp, Homo Sapiens
aaaacctttttccaaggacacca

SEQ ID NO: 63867 - DNA, 16 bp, Homo Sapiens
aaaacgaatgatttcg

SEQ ID NO: 63868 - DNA, 19 bp, Homo Sapiens
aaaacgaatgatttcgact

SEQ ID NO: 63869 - DNA, 20 bp, Homo Sapiens
aaaacgaatgatttcgactc

SEQ ID NO: 63870 - DNA, 21 bp, Homo Sapiens
aaaacgaatgatttcgactca

SEQ ID NO: 63871 - DNA, 22 bp, Homo Sapiens
aaaacgaatgatttcgactcat

SEQ ID NO: 63872 - DNA, 21 bp, Homo Sapiens
aaaactttacagtcagaggtt

SEQ ID NO: 63873 - DNA, 16 bp, Homo Sapiens
aaaatgtttagacggg

SEQ ID NO: 63874 - DNA, 17 bp, Homo Sapiens
aaaatgtttagacgggc

SEQ ID NO: 63875 - DNA, 18 bp, Homo Sapiens
aaaatgtttagacgggct

SEQ ID NO: 63876 - DNA, 19 bp, Homo Sapiens
aaaatgtttagacgggctc

SEQ ID NO: 63877 - DNA, 20 bp, Homo Sapiens
aaaatgtttagacgggctca

SEQ ID NO: 63878 - DNA, 21 bp, Homo Sapiens
aaaatgtttagacgggctcac

SEQ ID NO: 63879 - DNA, 22 bp, Homo Sapiens
aaaatgtttagacgggctcaca

SEQ ID NO: 63880 - DNA, 23 bp, Homo Sapiens
aaaatgtttagacgggctcacat

SEQ ID NO: 63881 - DNA, 18 bp, Homo Sapiens
aaaattttggtgcaactc

SEQ ID NO: 63882 - DNA, 19 bp, Homo Sapiens
aaaattttggtgcaactcc

SEQ ID NO: 63883 - DNA, 20 bp, Homo Sapiens
aaaattttggtgcaactcca

SEQ ID NO: 63884 - DNA, 24 bp, Homo Sapiens
aaaattttggtgcaactccaaata

SEQ ID NO: 63885 - DNA, 20 bp, Homo Sapiens
aaacaaaacgaatgatttcg

SEQ ID NO: 63886 - DNA, 21 bp, Homo Sapiens
aaacaggagatcctgggttcg

SEQ ID NO: 63887 - DNA, 22 bp, Homo Sapiens
aaacaggagatcctgggttcga

SEQ ID NO: 63888 - DNA, 16 bp, Homo Sapiens
aaacatcagattgtga

SEQ ID NO: 63889 - DNA, 18 bp, Homo Sapiens
aaacatcagattgtgaat

SEQ ID NO: 63890 - DNA, 19 bp, Homo Sapiens
aaacatcagattgtgaatc

SEQ ID NO: 63891 - DNA, 20 bp, Homo Sapiens
aaacatcagattgtgaatct

SEQ ID NO: 63892 - DNA, 22 bp, Homo Sapiens
aaacatcagattgtgaatctga

SEQ ID NO: 63893 - DNA, 23 bp, Homo Sapiens
aaacatcagattgtgaatctgac

SEQ ID NO: 63894 - DNA, 24 bp, Homo Sapiens
aaacatcagattgtgaatctgaca

SEQ ID NO: 63895 - DNA, 19 bp, Homo Sapiens
aaaccatcctctgctacca

SEQ ID NO: 63896 - DNA, 20 bp, Homo Sapiens
aaaccatttcataactttgt

SEQ ID NO: 63897 - DNA, 18 bp, Homo Sapiens
aaacccccttatttctac

SEQ ID NO: 63898 - DNA, 19 bp, Homo Sapiens
aaacccccttatttctacc

SEQ ID NO: 63899 - DNA, 20 bp, Homo Sapiens
aaacccccttatttctacca

SEQ ID NO: 63900 - DNA, 17 bp, Homo Sapiens
aaaccggagatgaaaac

SEQ ID NO: 63901 - DNA, 18 bp, Homo Sapiens
aaaccggagatgaaaacc

SEQ ID NO: 63902 - DNA, 19 bp, Homo Sapiens
aaaccggagatgaaaacct

SEQ ID NO: 63903 - DNA, 18 bp, Homo Sapiens
aaaccgggcggaaacacc

SEQ ID NO: 63904 - DNA, 19 bp, Homo Sapiens
aaaccgggcggaaacacca

SEQ ID NO: 63905 - DNA, 16 bp, Homo Sapiens
aaacctgccggggctt

SEQ ID NO: 63906 - DNA, 17 bp, Homo Sapiens
aaacctgccggggcttc

SEQ ID NO: 63907 - DNA, 18 bp, Homo Sapiens
aaacctgccggggcttcc

SEQ ID NO: 63908 - DNA, 21 bp, Homo Sapiens
aaacctttttccaaggacacc

SEQ ID NO: 63909 - DNA, 22 bp, Homo Sapiens
aaacctttttccaaggacacca

SEQ ID NO: 63910 - DNA, 18 bp, Homo Sapiens
aaacgaatgatttcgact

SEQ ID NO: 63911 - DNA, 19 bp, Homo Sapiens
aaacgaatgatttcgactc

SEQ ID NO: 63912 - DNA, 20 bp, Homo Sapiens
aaacgaatgatttcgactca

SEQ ID NO: 63913 - DNA, 21 bp, Homo Sapiens
aaacgaatgatttcgactcat

SEQ ID NO: 63914 - DNA, 22 bp, Homo Sapiens
aaacgaatgatttcgactcatt

SEQ ID NO: 63915 - DNA, 19 bp, Homo Sapiens
aaagacaggggttaggcct

SEQ ID NO: 63916 - DNA, 20 bp, Homo Sapiens
aaagacaggggttaggcctc

SEQ ID NO: 63917 - DNA, 21 bp, Homo Sapiens
aaagacaggggttaggcctct

SEQ ID NO: 63918 - DNA, 22 bp, Homo Sapiens
aaagacaggggttaggcctctt

SEQ ID NO: 63919 - DNA, 23 bp, Homo Sapiens
aaagacaggggttaggcctcttt

SEQ ID NO: 63920 - DNA, 25 bp, Homo Sapiens
aaagacaggggttaggcctcttttt

SEQ ID NO: 63921 - DNA, 17 bp, Homo Sapiens
aaagactttttctctga

SEQ ID NO: 63922 - DNA, 18 bp, Homo Sapiens
aaagactttttctctgac

SEQ ID NO: 63923 - DNA, 19 bp, Homo Sapiens
aaagactttttctctgacc

SEQ ID NO: 63924 - DNA, 20 bp, Homo Sapiens
aaagactttttctctgacca

SEQ ID NO: 63925 - DNA, 16 bp, Homo Sapiens
aaagattaagagaacc

SEQ ID NO: 63926 - DNA, 17 bp, Homo Sapiens
aaagattaagagaacca

SEQ ID NO: 63927 - DNA, 18 bp, Homo Sapiens
aaagattaagagaaccaa

SEQ ID NO: 63928 - DNA, 19 bp, Homo Sapiens
aaagattaagagaaccaac

SEQ ID NO: 63929 - DNA, 20 bp, Homo Sapiens
aaagattaagagaaccaaca

SEQ ID NO: 63930 - DNA, 21 bp, Homo Sapiens
aaagattaagagaaccaacac

SEQ ID NO: 63931 - DNA, 22 bp, Homo Sapiens
aaagattaagagaaccaacacc

SEQ ID NO: 63932 - DNA, 16 bp, Homo Sapiens
aaagcaatacactgaa

SEQ ID NO: 63933 - DNA, 16 bp, Homo Sapiens
aaagcacccaacttac

SEQ ID NO: 63934 - DNA, 17 bp, Homo Sapiens
aaagcacccaacttaca

SEQ ID NO: 63935 - DNA, 18 bp, Homo Sapiens
aaagcacccaacttacac

SEQ ID NO: 63936 - DNA, 20 bp, Homo Sapiens
aaagcacccaacttacactt

SEQ ID NO: 63937 - DNA, 18 bp, Homo Sapiens
aaagctcacaagaactgc

SEQ ID NO: 63938 - DNA, 19 bp, Homo Sapiens
aaagctcacaagaactgct

SEQ ID NO: 63939 - DNA, 20 bp, Homo Sapiens
aaagctcacaagaactgcta

SEQ ID NO: 63940 - DNA, 21 bp, Homo Sapiens
aaagctcacaagaactgctaa

SEQ ID NO: 63941 - DNA, 22 bp, Homo Sapiens
aaagctcacaagaactgctaac

SEQ ID NO: 63942 - DNA, 16 bp, Homo Sapiens
aaagtggctgatttgc

SEQ ID NO: 63943 - DNA, 16 bp, Homo Sapiens
aaagttaaattatagg

SEQ ID NO: 63944 - DNA, 16 bp, Homo Sapiens
aaataagctatcgggc

SEQ ID NO: 63945 - DNA, 18 bp, Homo Sapiens
aaataagctatcgggccc

SEQ ID NO: 63946 - DNA, 19 bp, Homo Sapiens
aaataagctatcgggccca

SEQ ID NO: 63947 - DNA, 17 bp, Homo Sapiens
aaataataggagcttaa

SEQ ID NO: 63948 - DNA, 19 bp, Homo Sapiens
aaataataggagcttaaac

SEQ ID NO: 63949 - DNA, 20 bp, Homo Sapiens
aaataataggagcttaaacc

SEQ ID NO: 63950 - DNA, 21 bp, Homo Sapiens
aaataataggagcttaaaccc

SEQ ID NO: 63951 - DNA, 20 bp, Homo Sapiens
aaatacaacgatggtttttc

SEQ ID NO: 63952 - DNA, 17 bp, Homo Sapiens
aaatacagaccaagagc

SEQ ID NO: 63953 - DNA, 18 bp, Homo Sapiens
aaatacagaccaagagcc

SEQ ID NO: 63954 - DNA, 21 bp, Homo Sapiens
aaatacagaccaagagccttc

SEQ ID NO: 63955 - DNA, 22 bp, Homo Sapiens
aaatacagaccaagagccttca

SEQ ID NO: 63956 - DNA, 20 bp, Homo Sapiens
aaatagtaccgttaacttcc

SEQ ID NO: 63957 - DNA, 18 bp, Homo Sapiens
aaatcccggacgagcccc

SEQ ID NO: 63958 - DNA, 19 bp, Homo Sapiens
aaatcccggacgagccccc

SEQ ID NO: 63959 - DNA, 20 bp, Homo Sapiens
aaatcctatatatcttacca

SEQ ID NO: 63960 - DNA, 19 bp, Homo Sapiens
aaatctcggtggaacctcc

SEQ ID NO: 63961 - DNA, 20 bp, Homo Sapiens
aaatctcggtggaacctcca

SEQ ID NO: 63962 - DNA, 16 bp, Homo Sapiens
aaatgtttagacgggc

SEQ ID NO: 63963 - DNA, 17 bp, Homo Sapiens
aaatgtttagacgggct

SEQ ID NO: 63964 - DNA, 18 bp, Homo Sapiens
aaatgtttagacgggctc

SEQ ID NO: 63965 - DNA, 19 bp, Homo Sapiens
aaatgtttagacgggctca

SEQ ID NO: 63966 - DNA, 20 bp, Homo Sapiens
aaatgtttagacgggctcac

SEQ ID NO: 63967 - DNA, 21 bp, Homo Sapiens
aaatgtttagacgggctcaca

SEQ ID NO: 63968 - DNA, 22 bp, Homo Sapiens
aaatgtttagacgggctcacat

SEQ ID NO: 63969 - DNA, 22 bp, Homo Sapiens
aaattataggctaaatcctata

SEQ ID NO: 63970 - DNA, 24 bp, Homo Sapiens
aaattataggctaaatcctatata

SEQ ID NO: 63971 - DNA, 23 bp, Homo Sapiens
aaattttggtgcaactccaaata

SEQ ID NO: 63972 - DNA, 19 bp, Homo Sapiens
aacaaaacgaatgatttcg

SEQ ID NO: 63973 - DNA, 18 bp, Homo Sapiens
aacaacatggctttctca

SEQ ID NO: 63974 - DNA, 20 bp, Homo Sapiens
aacaacatggctttctcacc

SEQ ID NO: 63975 - DNA, 21 bp, Homo Sapiens
aacaacatggctttctcacca

SEQ ID NO: 63976 - DNA, 18 bp, Homo Sapiens
aacacaaagcacccaact

SEQ ID NO: 63977 - DNA, 18 bp, Homo Sapiens
aacacctctttacagtga

SEQ ID NO: 63978 - DNA, 19 bp, Homo Sapiens
aacacctctttacagtgac

SEQ ID NO: 63979 - DNA, 20 bp, Homo Sapiens
aacacctctttacagtgacc

SEQ ID NO: 63980 - DNA, 21 bp, Homo Sapiens
aacacctctttacagtgacca

SEQ ID NO: 63981 - DNA, 18 bp, Homo Sapiens
aacagctatccattggtc

SEQ ID NO: 63982 - DNA, 19 bp, Homo Sapiens
aacagctatccattggtct

SEQ ID NO: 63983 - DNA, 19 bp, Homo Sapiens
aacaggagatcctgggttc

SEQ ID NO: 63984 - DNA, 20 bp, Homo Sapiens
aacaggagatcctgggttcg

SEQ ID NO: 63985 - DNA, 21 bp, Homo Sapiens
aacaggagatcctgggttcga

SEQ ID NO: 63986 - DNA, 17 bp, Homo Sapiens
aacatcagattgtgaat

SEQ ID NO: 63987 - DNA, 18 bp, Homo Sapiens
aacatcagattgtgaatc

SEQ ID NO: 63988 - DNA, 19 bp, Homo Sapiens
aacatcagattgtgaatct

SEQ ID NO: 63989 - DNA, 20 bp, Homo Sapiens
aacatcagattgtgaatctg

SEQ ID NO: 63990 - DNA, 21 bp, Homo Sapiens
aacatcagattgtgaatctga

SEQ ID NO: 63991 - DNA, 22 bp, Homo Sapiens
aacatcagattgtgaatctgac

SEQ ID NO: 63992 - DNA, 23 bp, Homo Sapiens
aacatcagattgtgaatctgaca

SEQ ID NO: 63993 - DNA, 17 bp, Homo Sapiens
aacatggctttctcacc

SEQ ID NO: 63994 - DNA, 18 bp, Homo Sapiens
aacatggctttctcacca

SEQ ID NO: 63995 - DNA, 21 bp, Homo Sapiens
aacattcaaaaaagagtacca

SEQ ID NO: 63996 - DNA, 19 bp, Homo Sapiens
aaccaaaacatcagattgt

SEQ ID NO: 63997 - DNA, 20 bp, Homo Sapiens
aaccaaaacatcagattgtg

SEQ ID NO: 63998 - DNA, 18 bp, Homo Sapiens
aaccaggcggaaacacca

SEQ ID NO: 63999 - DNA, 17 bp, Homo Sapiens
aaccatcctctgctacc

SEQ ID NO: 64000 - DNA, 18 bp, Homo Sapiens
aaccatcctctgctacca

SEQ ID NO: 64001 - DNA, 18 bp, Homo Sapiens
aacccagaggtcgatgga

SEQ ID NO: 64002 - DNA, 21 bp, Homo Sapiens
aacccagaggtcgatggatcg

SEQ ID NO: 64003 - DNA, 19 bp, Homo Sapiens
aaccccactcctggtacca

SEQ ID NO: 64004 - DNA, 17 bp, Homo Sapiens
aacccccttatttctac

SEQ ID NO: 64005 - DNA, 18 bp, Homo Sapiens
aacccccttatttctacc

SEQ ID NO: 64006 - DNA, 19 bp, Homo Sapiens
aacccccttatttctacca

SEQ ID NO: 64007 - DNA, 20 bp, Homo Sapiens
aaccgaagatcacgggttcg

SEQ ID NO: 64008 - DNA, 21 bp, Homo Sapiens
aaccgaagatcacgggttcga

SEQ ID NO: 64009 - DNA, 23 bp, Homo Sapiens
aaccgaagatcacgggttcgaac

SEQ ID NO: 64010 - DNA, 21 bp, Homo Sapiens
aaccgaagatcgcgggttcga

SEQ ID NO: 64011 - DNA, 18 bp, Homo Sapiens
aaccgagcggaaacacca

SEQ ID NO: 64012 - DNA, 16 bp, Homo Sapiens
aaccggagatgaaaac

SEQ ID NO: 64013 - DNA, 17 bp, Homo Sapiens
aaccggagatgaaaacc

SEQ ID NO: 64014 - DNA, 18 bp, Homo Sapiens
aaccggagatgaaaacct

SEQ ID NO: 64015 - DNA, 19 bp, Homo Sapiens
aaccggagatgaaaacctt

SEQ ID NO: 64016 - DNA, 20 bp, Homo Sapiens
aaccggagatgaaaaccttt

SEQ ID NO: 64017 - DNA, 21 bp, Homo Sapiens
aaccggagatgaaaacctttt

SEQ ID NO: 64018 - DNA, 18 bp, Homo Sapiens
aaccgggcagaagcacca

SEQ ID NO: 64019 - DNA, 16 bp, Homo Sapiens
aaccgggcggaaacac

SEQ ID NO: 64020 - DNA, 17 bp, Homo Sapiens
aaccgggcggaaacacc

SEQ ID NO: 64021 - DNA, 18 bp, Homo Sapiens
aaccgggcggaaacacca

SEQ ID NO: 64022 - DNA, 16 bp, Homo Sapiens
aacctgccggggcttc

SEQ ID NO: 64023 - DNA, 17 bp, Homo Sapiens
aacctgccggggcttcc

SEQ ID NO: 64024 - DNA, 20 bp, Homo Sapiens
aacctttttccaaggacacc

SEQ ID NO: 64025 - DNA, 21 bp, Homo Sapiens
aacctttttccaaggacacca

SEQ ID NO: 64026 - DNA, 18 bp, Homo Sapiens
aacgaatgatttcgactc

SEQ ID NO: 64027 - DNA, 19 bp, Homo Sapiens
aacgaatgatttcgactca

SEQ ID NO: 64028 - DNA, 20 bp, Homo Sapiens
aacgaatgatttcgactcat

SEQ ID NO: 64029 - DNA, 21 bp, Homo Sapiens
aacgaatgatttcgactcatt

SEQ ID NO: 64030 - DNA, 19 bp, Homo Sapiens
aacgatggtttttcatatc

SEQ ID NO: 64031 - DNA, 20 bp, Homo Sapiens
aacgatggtttttcatatca

SEQ ID NO: 64032 - DNA, 18 bp, Homo Sapiens
aactaagtgtttgtgggt

SEQ ID NO: 64033 - DNA, 19 bp, Homo Sapiens
aactaagtgtttgtgggtt

SEQ ID NO: 64034 - DNA, 20 bp, Homo Sapiens
aactaagtgtttgtgggttt

SEQ ID NO: 64035 - DNA, 16 bp, Homo Sapiens
aactagttttgacaac

SEQ ID NO: 64036 - DNA, 19 bp, Homo Sapiens
aactcatgcccccatgtct

SEQ ID NO: 64037 - DNA, 19 bp, Homo Sapiens
aactccaaataaaagtacc

SEQ ID NO: 64038 - DNA, 20 bp, Homo Sapiens
aactccaaataaaagtacca

SEQ ID NO: 64039 - DNA, 17 bp, Homo Sapiens
aactgctaactcatgcc

SEQ ID NO: 64040 - DNA, 17 bp, Homo Sapiens
aacttaacttgaccgct

SEQ ID NO: 64041 - DNA, 18 bp, Homo Sapiens
aacttaacttgaccgctc

SEQ ID NO: 64042 - DNA, 19 bp, Homo Sapiens
aacttaacttgaccgctct

SEQ ID NO: 64043 - DNA, 20 bp, Homo Sapiens
aacttaacttgaccgctctg

SEQ ID NO: 64044 - DNA, 21 bp, Homo Sapiens
aacttaacttgaccgctctga

SEQ ID NO: 64045 - DNA, 22 bp, Homo Sapiens
aacttaacttgaccgctctgac

SEQ ID NO: 64046 - DNA, 23 bp, Homo Sapiens
aacttaacttgaccgctctgacc

SEQ ID NO: 64047 - DNA, 24 bp, Homo Sapiens
aacttaacttgaccgctctgacca

SEQ ID NO: 64048 - DNA, 16 bp, Homo Sapiens
aacttacacttaggag

SEQ ID NO: 64049 - DNA, 17 bp, Homo Sapiens
aacttacacttaggaga

SEQ ID NO: 64050 - DNA, 18 bp, Homo Sapiens
aacttacacttaggagat

SEQ ID NO: 64051 - DNA, 19 bp, Homo Sapiens
aacttacacttaggagatt

SEQ ID NO: 64052 - DNA, 20 bp, Homo Sapiens
aacttacacttaggagattt

SEQ ID NO: 64053 - DNA, 21 bp, Homo Sapiens
aacttacacttaggagatttc

SEQ ID NO: 64054 - DNA, 22 bp, Homo Sapiens
aacttacacttaggagatttca

SEQ ID NO: 64055 - DNA, 24 bp, Homo Sapiens
aacttacacttaggagatttcaac

SEQ ID NO: 64056 - DNA, 18 bp, Homo Sapiens
aacttagcattaaccttt

SEQ ID NO: 64057 - DNA, 19 bp, Homo Sapiens
aacttagcattaacctttt

SEQ ID NO: 64058 - DNA, 16 bp, Homo Sapiens
aacttgaccgctctga

SEQ ID NO: 64059 - DNA, 17 bp, Homo Sapiens
aacttgaccgctctgac

SEQ ID NO: 64060 - DNA, 18 bp, Homo Sapiens
aacttgaccgctctgacc

SEQ ID NO: 64061 - DNA, 19 bp, Homo Sapiens
aacttgaccgctctgacca

SEQ ID NO: 64062 - DNA, 19 bp, Homo Sapiens
aactttacagtcagaggtt

SEQ ID NO: 64063 - DNA, 16 bp, Homo Sapiens
aagaactgctaactca

SEQ ID NO: 64064 - DNA, 18 bp, Homo Sapiens
aagaactgctaactcatg

SEQ ID NO: 64065 - DNA, 19 bp, Homo Sapiens
aagaactgctaactcatgc

SEQ ID NO: 64066 - DNA, 20 bp, Homo Sapiens
aagaactgctaactcatgcc

SEQ ID NO: 64067 - DNA, 23 bp, Homo Sapiens
aagaactgctaactcatgccccc

SEQ ID NO: 64068 - DNA, 22 bp, Homo Sapiens
aagaagcagcttcaaacctgcc

SEQ ID NO: 64069 - DNA, 19 bp, Homo Sapiens
aagacaggggttaggcctc

SEQ ID NO: 64070 - DNA, 22 bp, Homo Sapiens
aagacaggggttaggcctcttt

SEQ ID NO: 64071 - DNA, 16 bp, Homo Sapiens
aagactttttctctga

SEQ ID NO: 64072 - DNA, 17 bp, Homo Sapiens
aagactttttctctgac

SEQ ID NO: 64073 - DNA, 18 bp, Homo Sapiens
aagactttttctctgacc

SEQ ID NO: 64074 - DNA, 19 bp, Homo Sapiens
aagactttttctctgacca

SEQ ID NO: 64075 - DNA, 21 bp, Homo Sapiens
aagagaaccaacacctcttta

SEQ ID NO: 64076 - DNA, 16 bp, Homo Sapiens
aagaggtccccggttc

SEQ ID NO: 64077 - DNA, 17 bp, Homo Sapiens
aagaggtccccggttca

SEQ ID NO: 64078 - DNA, 16 bp, Homo Sapiens
aagattaagagaacca

SEQ ID NO: 64079 - DNA, 17 bp, Homo Sapiens
aagattaagagaaccaa

SEQ ID NO: 64080 - DNA, 18 bp, Homo Sapiens
aagattaagagaaccaac

SEQ ID NO: 64081 - DNA, 19 bp, Homo Sapiens
aagattaagagaaccaaca

SEQ ID NO: 64082 - DNA, 20 bp, Homo Sapiens
aagattaagagaaccaacac

SEQ ID NO: 64083 - DNA, 21 bp, Homo Sapiens
aagattaagagaaccaacacc

SEQ ID NO: 64084 - DNA, 22 bp, Homo Sapiens
aagattgagggttcgagtccct

SEQ ID NO: 64085 - DNA, 24 bp, Homo Sapiens
aagattgagggttcgagtcccttc

SEQ ID NO: 64086 - DNA, 24 bp, Homo Sapiens
aagattgcaggttcgagtcctgcc

SEQ ID NO: 64087 - DNA, 16 bp, Homo Sapiens
aagcacccaacttaca

SEQ ID NO: 64088 - DNA, 20 bp, Homo Sapiens
aagcacccaacttacactta

SEQ ID NO: 64089 - DNA, 18 bp, Homo Sapiens
aagcagcttcaaacctgc

SEQ ID NO: 64090 - DNA, 17 bp, Homo Sapiens
aagcagttgacccgggt

SEQ ID NO: 64091 - DNA, 16 bp, Homo Sapiens
aagccagggattgtgg

SEQ ID NO: 64092 - DNA, 18 bp, Homo Sapiens
aagccagggattgtgggt

SEQ ID NO: 64093 - DNA, 19 bp, Homo Sapiens
aagccagggattgtgggtt

SEQ ID NO: 64094 - DNA, 20 bp, Homo Sapiens
aagccagggattgtgggttc

SEQ ID NO: 64095 - DNA, 16 bp, Homo Sapiens
aagctatcgggcccat

SEQ ID NO: 64096 - DNA, 17 bp, Homo Sapiens
aagctatcgggcccata

SEQ ID NO: 64097 - DNA, 18 bp, Homo Sapiens
aagctatcgggcccatac

SEQ ID NO: 64098 - DNA, 19 bp, Homo Sapiens
aagctatcgggcccatacc

SEQ ID NO: 64099 - DNA, 23 bp, Homo Sapiens
aagctatcgggcccataccccga

SEQ ID NO: 64100 - DNA, 24 bp, Homo Sapiens
aagctatcgggcccataccccgaa

SEQ ID NO: 64101 - DNA, 17 bp, Homo Sapiens
aagctcacaagaactgc

SEQ ID NO: 64102 - DNA, 18 bp, Homo Sapiens
aagctcacaagaactgct

SEQ ID NO: 64103 - DNA, 19 bp, Homo Sapiens
aagctcacaagaactgcta

SEQ ID NO: 64104 - DNA, 20 bp, Homo Sapiens
aagctcacaagaactgctaa

SEQ ID NO: 64105 - DNA, 21 bp, Homo Sapiens
aagctcacaagaactgctaac

SEQ ID NO: 64106 - DNA, 22 bp, Homo Sapiens
aagctcacaagaactgctaact

SEQ ID NO: 64107 - DNA, 16 bp, Homo Sapiens
aagggcttagcttaat

SEQ ID NO: 64108 - DNA, 17 bp, Homo Sapiens
aagggcttagcttaatt

SEQ ID NO: 64109 - DNA, 18 bp, Homo Sapiens
aagggcttagcttaatta

SEQ ID NO: 64110 - DNA, 16 bp, Homo Sapiens
aaggtattagaaaaac

SEQ ID NO: 64111 - DNA, 17 bp, Homo Sapiens
aaggtattagaaaaacc

SEQ ID NO: 64112 - DNA, 17 bp, Homo Sapiens
aaggtcagctaaataag

SEQ ID NO: 64113 - DNA, 18 bp, Homo Sapiens
aaggtcagctaaataagc

SEQ ID NO: 64114 - DNA, 24 bp, Homo Sapiens
aaggttccgggttcgagtcccggc

SEQ ID NO: 64115 - DNA, 19 bp, Homo Sapiens
aagtcccattggtctagcc

SEQ ID NO: 64116 - DNA, 19 bp, Homo Sapiens
aagtggctgatttgcgttc

SEQ ID NO: 64117 - DNA, 18 bp, Homo Sapiens
aagttaaagattaagaga

SEQ ID NO: 64118 - DNA, 20 bp, Homo Sapiens
aagttaaagattaagagaac

SEQ ID NO: 64119 - DNA, 21 bp, Homo Sapiens
aagttaaagattaagagaacc

SEQ ID NO: 64120 - DNA, 19 bp, Homo Sapiens
aagttaaattataggctaa

SEQ ID NO: 64121 - DNA, 23 bp, Homo Sapiens
aagttgcaatacttaatttctgc

SEQ ID NO: 64122 - DNA, 24 bp, Homo Sapiens
aagttgcaatacttaatttctgcc

SEQ ID NO: 64123 - DNA, 25 bp, Homo Sapiens
aagttgcaatacttaatttctgcca

SEQ ID NO: 64124 - DNA, 17 bp, Homo Sapiens
aataagctatcgggccc

SEQ ID NO: 64125 - DNA, 18 bp, Homo Sapiens
aataagctatcgggccca

SEQ ID NO: 64126 - DNA, 19 bp, Homo Sapiens
aataagctatcgggcccat

SEQ ID NO: 64127 - DNA, 16 bp, Homo Sapiens
aataataggagcttaa

SEQ ID NO: 64128 - DNA, 18 bp, Homo Sapiens
aataataggagcttaaac

SEQ ID NO: 64129 - DNA, 19 bp, Homo Sapiens
aataataggagcttaaacc

SEQ ID NO: 64130 - DNA, 20 bp, Homo Sapiens
aataataggagcttaaaccc

SEQ ID NO: 64131 - DNA, 21 bp, Homo Sapiens
aataataggagcttaaacccc

SEQ ID NO: 64132 - DNA, 22 bp, Homo Sapiens
aataataggagcttaaaccccc

SEQ ID NO: 64133 - DNA, 19 bp, Homo Sapiens
aatacaacgatggtttttc

SEQ ID NO: 64134 - DNA, 20 bp, Homo Sapiens
aatacaacgatggtttttca

SEQ ID NO: 64135 - DNA, 16 bp, Homo Sapiens
aatacagaccaagagc

SEQ ID NO: 64136 - DNA, 20 bp, Homo Sapiens
aatacagaccaagagccttc

SEQ ID NO: 64137 - DNA, 21 bp, Homo Sapiens
aatacagaccaagagccttca

SEQ ID NO: 64138 - DNA, 17 bp, Homo Sapiens
aatacttaatttctgcc

SEQ ID NO: 64139 - DNA, 18 bp, Homo Sapiens
aatacttaatttctgcca

SEQ ID NO: 64140 - DNA, 16 bp, Homo Sapiens
aataggagcttaaacc

SEQ ID NO: 64141 - DNA, 17 bp, Homo Sapiens
aataggagcttaaaccc

SEQ ID NO: 64142 - DNA, 18 bp, Homo Sapiens
aataggagcttaaacccc

SEQ ID NO: 64143 - DNA, 19 bp, Homo Sapiens
aataggagcttaaaccccc

SEQ ID NO: 64144 - DNA, 20 bp, Homo Sapiens
aataggagcttaaaccccct

SEQ ID NO: 64145 - DNA, 18 bp, Homo Sapiens
aatagtaccgttaacttc

SEQ ID NO: 64146 - DNA, 19 bp, Homo Sapiens
aatagtaccgttaacttcc

SEQ ID NO: 64147 - DNA, 20 bp, Homo Sapiens
aatagtaccgttaacttcca

SEQ ID NO: 64148 - DNA, 18 bp, Homo Sapiens
aatcacgtcggggtcacc

SEQ ID NO: 64149 - DNA, 19 bp, Homo Sapiens
aatcacgtcggggtcacca

SEQ ID NO: 64150 - DNA, 17 bp, Homo Sapiens
aatcatatttaccaacc

SEQ ID NO: 64151 - DNA, 18 bp, Homo Sapiens
aatcatatttaccaacca

SEQ ID NO: 64152 - DNA, 18 bp, Homo Sapiens
aatccagcgatccgagtt

SEQ ID NO: 64153 - DNA, 19 bp, Homo Sapiens
aatccagcgatccgagttc

SEQ ID NO: 64154 - DNA, 20 bp, Homo Sapiens
aatccagcgatccgagttca

SEQ ID NO: 64155 - DNA, 21 bp, Homo Sapiens
aatccagcgatccgagttcaa

SEQ ID NO: 64156 - DNA, 22 bp, Homo Sapiens
aatccagcgatccgagttcaaa

SEQ ID NO: 64157 - DNA, 23 bp, Homo Sapiens
aatccagcgatccgagttcaaat

SEQ ID NO: 64158 - DNA, 23 bp, Homo Sapiens
aatccagcgatccgagttcgagt

SEQ ID NO: 64159 - DNA, 19 bp, Homo Sapiens
aatcccaccgctgccacca

SEQ ID NO: 64160 - DNA, 18 bp, Homo Sapiens
aatcccactcctgacacc

SEQ ID NO: 64161 - DNA, 19 bp, Homo Sapiens
aatcccactcctgacacca

SEQ ID NO: 64162 - DNA, 18 bp, Homo Sapiens
aatcccagcggggcctcc

SEQ ID NO: 64163 - DNA, 18 bp, Homo Sapiens
aatcccagcggtgcctcc

SEQ ID NO: 64164 - DNA, 19 bp, Homo Sapiens
aatcccagcggtgcctcca

SEQ ID NO: 64165 - DNA, 18 bp, Homo Sapiens
aatcccatcctcgtcgcc

SEQ ID NO: 64166 - DNA, 19 bp, Homo Sapiens
aatcccatcctcgtcgcca

SEQ ID NO: 64167 - DNA, 17 bp, Homo Sapiens
aatcccggacgagcccc

SEQ ID NO: 64168 - DNA, 18 bp, Homo Sapiens
aatcccggacgagccccc

SEQ ID NO: 64169 - DNA, 16 bp, Homo Sapiens
aatccgagtcacggca

SEQ ID NO: 64170 - DNA, 18 bp, Homo Sapiens
aatccgagtcacggcacc

SEQ ID NO: 64171 - DNA, 19 bp, Homo Sapiens
aatccgagtcacggcacca

SEQ ID NO: 64172 - DNA, 19 bp, Homo Sapiens
aatccggctcgaaggacca

SEQ ID NO: 64173 - DNA, 18 bp, Homo Sapiens
aatccgggtgccccctcc

SEQ ID NO: 64174 - DNA, 19 bp, Homo Sapiens
aatccgggtgccccctcca

SEQ ID NO: 64175 - DNA, 19 bp, Homo Sapiens
aatcctatatatcttacca

SEQ ID NO: 64176 - DNA, 19 bp, Homo Sapiens
aatcctgccgactacgcca

SEQ ID NO: 64177 - DNA, 18 bp, Homo Sapiens
aatctcgctggggcctcc

SEQ ID NO: 64178 - DNA, 18 bp, Homo Sapiens
aatctcggtggaacctcc

SEQ ID NO: 64179 - DNA, 19 bp, Homo Sapiens
aatctcggtggaacctcca

SEQ ID NO: 64180 - DNA, 18 bp, Homo Sapiens
aatctcggtgggacctcc

SEQ ID NO: 64181 - DNA, 19 bp, Homo Sapiens
aatctcggtgggacctcca

SEQ ID NO: 64182 - DNA, 16 bp, Homo Sapiens
aatctgacaacagagg

SEQ ID NO: 64183 - DNA, 17 bp, Homo Sapiens
aatctgacaacagaggc

SEQ ID NO: 64184 - DNA, 18 bp, Homo Sapiens
aatctgacaacagaggct

SEQ ID NO: 64185 - DNA, 19 bp, Homo Sapiens
aatctgacaacagaggctt

SEQ ID NO: 64186 - DNA, 20 bp, Homo Sapiens
aatctgacaacagaggctta

SEQ ID NO: 64187 - DNA, 21 bp, Homo Sapiens
aatctgacaacagaggcttac

SEQ ID NO: 64188 - DNA, 22 bp, Homo Sapiens
aatctgacaacagaggcttacg

SEQ ID NO: 64189 - DNA, 23 bp, Homo Sapiens
aatctgacaacagaggcttacga

SEQ ID NO: 64190 - DNA, 24 bp, Homo Sapiens
aatctgacaacagaggcttacgac

SEQ ID NO: 64191 - DNA, 16 bp, Homo Sapiens
aatgatttcgactcat

SEQ ID NO: 64192 - DNA, 17 bp, Homo Sapiens
aatgatttcgactcatt

SEQ ID NO: 64193 - DNA, 20 bp, Homo Sapiens
aatggataaggcatcagcct

SEQ ID NO: 64194 - DNA, 16 bp, Homo Sapiens
aatggataaggcattg

SEQ ID NO: 64195 - DNA, 17 bp, Homo Sapiens
aatggatagcgcattgg

SEQ ID NO: 64196 - DNA, 17 bp, Homo Sapiens
aatggtggagttaaaga

SEQ ID NO: 64197 - DNA, 18 bp, Homo Sapiens
aatggtggagttaaagac

SEQ ID NO: 64198 - DNA, 19 bp, Homo Sapiens
aatggtggagttaaagact

SEQ ID NO: 64199 - DNA, 20 bp, Homo Sapiens
aatggtggagttaaagactt

SEQ ID NO: 64200 - DNA, 21 bp, Homo Sapiens
aatggtggagttaaagacttt

SEQ ID NO: 64201 - DNA, 20 bp, Homo Sapiens
aatgttggttatacccttcc

SEQ ID NO: 64202 - DNA, 16 bp, Homo Sapiens
aatgtttagacgggct

SEQ ID NO: 64203 - DNA, 17 bp, Homo Sapiens
aatgtttagacgggctc

SEQ ID NO: 64204 - DNA, 18 bp, Homo Sapiens
aatgtttagacgggctca

SEQ ID NO: 64205 - DNA, 19 bp, Homo Sapiens
aatgtttagacgggctcac

SEQ ID NO: 64206 - DNA, 20 bp, Homo Sapiens
aatgtttagacgggctcaca

SEQ ID NO: 64207 - DNA, 21 bp, Homo Sapiens
aatgtttagacgggctcacat

SEQ ID NO: 64208 - DNA, 18 bp, Homo Sapiens
aattaactagttttgaca

SEQ ID NO: 64209 - DNA, 19 bp, Homo Sapiens
aattaactagttttgacaa

SEQ ID NO: 64210 - DNA, 20 bp, Homo Sapiens
aattaactagttttgacaac

SEQ ID NO: 64211 - DNA, 21 bp, Homo Sapiens
aattaactagttttgacaaca

SEQ ID NO: 64212 - DNA, 22 bp, Homo Sapiens
aattatgataatcatatttacc

SEQ ID NO: 64213 - DNA, 16 bp, Homo Sapiens
aattctcgcctgccac

SEQ ID NO: 64214 - DNA, 21 bp, Homo Sapiens
aattttggtgcaactccaaat

SEQ ID NO: 64215 - DNA, 22 bp, Homo Sapiens
aattttggtgcaactccaaata

SEQ ID NO: 64216 - DNA, 18 bp, Homo Sapiens
acaaaacgaatgatttcg

SEQ ID NO: 64217 - DNA, 22 bp, Homo Sapiens
acaaaacgaatgatttcgactc

SEQ ID NO: 64218 - DNA, 23 bp, Homo Sapiens
acaaaacgaatgatttcgactca

SEQ ID NO: 64219 - DNA, 18 bp, Homo Sapiens
acaaagcacccaacttac

SEQ ID NO: 64220 - DNA, 19 bp, Homo Sapiens
acaacatggctttctcacc

SEQ ID NO: 64221 - DNA, 20 bp, Homo Sapiens
acaacatggctttctcacca

SEQ ID NO: 64222 - DNA, 17 bp, Homo Sapiens
acaacgatggtttttca

SEQ ID NO: 64223 - DNA, 16 bp, Homo Sapiens
acaagaactgctaact

SEQ ID NO: 64224 - DNA, 17 bp, Homo Sapiens
acaagaactgctaactc

SEQ ID NO: 64225 - DNA, 18 bp, Homo Sapiens
acaagaactgctaactca

SEQ ID NO: 64226 - DNA, 19 bp, Homo Sapiens
acaagaactgctaactcat

SEQ ID NO: 64227 - DNA, 20 bp, Homo Sapiens
acaagaactgctaactcatg

SEQ ID NO: 64228 - DNA, 21 bp, Homo Sapiens
acaagaactgctaactcatgc

SEQ ID NO: 64229 - DNA, 22 bp, Homo Sapiens
acaagaactgctaactcatgcc

SEQ ID NO: 64230 - DNA, 18 bp, Homo Sapiens
acacctctttacagtgac

SEQ ID NO: 64231 - DNA, 19 bp, Homo Sapiens
acacctctttacagtgacc

SEQ ID NO: 64232 - DNA, 20 bp, Homo Sapiens
acacctctttacagtgacca

SEQ ID NO: 64233 - DNA, 17 bp, Homo Sapiens
acacttaggagatttca

SEQ ID NO: 64234 - DNA, 19 bp, Homo Sapiens
acacttaggagatttcaac

SEQ ID NO: 64235 - DNA, 20 bp, Homo Sapiens
acacttaggagatttcaact

SEQ ID NO: 64236 - DNA, 17 bp, Homo Sapiens
acagaccaagagccttc

SEQ ID NO: 64237 - DNA, 18 bp, Homo Sapiens
acagaccaagagccttca

SEQ ID NO: 64238 - DNA, 16 bp, Homo Sapiens
acagctatccattggt

SEQ ID NO: 64239 - DNA, 17 bp, Homo Sapiens
acagctatccattggtc

SEQ ID NO: 64240 - DNA, 18 bp, Homo Sapiens
acagctatccattggtct

SEQ ID NO: 64241 - DNA, 18 bp, Homo Sapiens
acaggagatcctgggttc

SEQ ID NO: 64242 - DNA, 19 bp, Homo Sapiens
acaggagatcctgggttcg

SEQ ID NO: 64243 - DNA, 20 bp, Homo Sapiens
acagtcagaggttcaattcc

SEQ ID NO: 64244 - DNA, 23 bp, Homo Sapiens
acagtcagaggttcaattcctct

SEQ ID NO: 64245 - DNA, 16 bp, Homo Sapiens
acatcaccccataaac

SEQ ID NO: 64246 - DNA, 17 bp, Homo Sapiens
acatcaccccataaaca

SEQ ID NO: 64247 - DNA, 19 bp, Homo Sapiens
acatcaccccataaacacc

SEQ ID NO: 64248 - DNA, 20 bp, Homo Sapiens
acatcaccccataaacacca

SEQ ID NO: 64249 - DNA, 16 bp, Homo Sapiens
acatcagattgtgaat

SEQ ID NO: 64250 - DNA, 17 bp, Homo Sapiens
acatcagattgtgaatc

SEQ ID NO: 64251 - DNA, 18 bp, Homo Sapiens
acatcagattgtgaatct

SEQ ID NO: 64252 - DNA, 19 bp, Homo Sapiens
acatcagattgtgaatctg

SEQ ID NO: 64253 - DNA, 20 bp, Homo Sapiens
acatcagattgtgaatctga

SEQ ID NO: 64254 - DNA, 21 bp, Homo Sapiens
acatcagattgtgaatctgac

SEQ ID NO: 64255 - DNA, 22 bp, Homo Sapiens
acatcagattgtgaatctgaca

SEQ ID NO: 64256 - DNA, 16 bp, Homo Sapiens
acatggctttctcacc

SEQ ID NO: 64257 - DNA, 17 bp, Homo Sapiens
acatggctttctcacca

SEQ ID NO: 64258 - DNA, 24 bp, Homo Sapiens
acatggtctagcggttaggattcc

SEQ ID NO: 64259 - DNA, 25 bp, Homo Sapiens
acatggtctagcggttaggattcct

SEQ ID NO: 64260 - DNA, 19 bp, Homo Sapiens
acattcaaaaaagagtacc

SEQ ID NO: 64261 - DNA, 20 bp, Homo Sapiens
acattcaaaaaagagtacca

SEQ ID NO: 64262 - DNA, 22 bp, Homo Sapiens
accaacacctctttacagtgac

SEQ ID NO: 64263 - DNA, 18 bp, Homo Sapiens
accagaatggccgagtgg

SEQ ID NO: 64264 - DNA, 16 bp, Homo Sapiens
accaggatggccgagt

SEQ ID NO: 64265 - DNA, 18 bp, Homo Sapiens
accaggatggccgagtgg

SEQ ID NO: 64266 - DNA, 19 bp, Homo Sapiens
accaggatggccgagtggt

SEQ ID NO: 64267 - DNA, 20 bp, Homo Sapiens
accaggatggccgagtggtt

SEQ ID NO: 64268 - DNA, 22 bp, Homo Sapiens
accaggatggccgagtggttaa

SEQ ID NO: 64269 - DNA, 24 bp, Homo Sapiens
accaggatggccgagtggttaagg

SEQ ID NO: 64270 - DNA, 17 bp, Homo Sapiens
accaggcggaaacacca

SEQ ID NO: 64271 - DNA, 18 bp, Homo Sapiens
accaggggtcgcgagttc

SEQ ID NO: 64272 - DNA, 16 bp, Homo Sapiens
accatcctctgctacc

SEQ ID NO: 64273 - DNA, 17 bp, Homo Sapiens
accatcctctgctacca

SEQ ID NO: 64274 - DNA, 18 bp, Homo Sapiens
acccaacttacacttagg

SEQ ID NO: 64275 - DNA, 21 bp, Homo Sapiens
acccaacttacacttaggaga

SEQ ID NO: 64276 - DNA, 17 bp, Homo Sapiens
acccagaggtcgatgga

SEQ ID NO: 64277 - DNA, 18 bp, Homo Sapiens
acccagaggtcgatggat

SEQ ID NO: 64278 - DNA, 19 bp, Homo Sapiens
acccagaggtcgatggatc

SEQ ID NO: 64279 - DNA, 20 bp, Homo Sapiens
acccagaggtcgatggatcg

SEQ ID NO: 64280 - DNA, 21 bp, Homo Sapiens
acccagaggtcgatggatcga

SEQ ID NO: 64281 - DNA, 22 bp, Homo Sapiens
acccagaggtcgatggatcgaa

SEQ ID NO: 64282 - DNA, 16 bp, Homo Sapiens
accccactcctggtac

SEQ ID NO: 64283 - DNA, 17 bp, Homo Sapiens
accccactcctggtacc

SEQ ID NO: 64284 - DNA, 18 bp, Homo Sapiens
accccactcctggtacca

SEQ ID NO: 64285 - DNA, 16 bp, Homo Sapiens
acccccttatttctac

SEQ ID NO: 64286 - DNA, 17 bp, Homo Sapiens
acccccttatttctacc

SEQ ID NO: 64287 - DNA, 18 bp, Homo Sapiens
acccccttatttctacca

SEQ ID NO: 64288 - DNA, 18 bp, Homo Sapiens
accccgaaaatgttggtt

SEQ ID NO: 64289 - DNA, 17 bp, Homo Sapiens
accccgtccgtgcctcc

SEQ ID NO: 64290 - DNA, 18 bp, Homo Sapiens
accccgtccgtgcctcca

SEQ ID NO: 64291 - DNA, 16 bp, Homo Sapiens
accccttatttacccc

SEQ ID NO: 64292 - DNA, 17 bp, Homo Sapiens
accccttatttacccca

SEQ ID NO: 64293 - DNA, 18 bp, Homo Sapiens
accctgctcgctgcgcca

SEQ ID NO: 64294 - DNA, 16 bp, Homo Sapiens
acccttcccgtactac

SEQ ID NO: 64295 - DNA, 17 bp, Homo Sapiens
acccttcccgtactacc

SEQ ID NO: 64296 - DNA, 18 bp, Homo Sapiens
acccttcccgtactacca

SEQ ID NO: 64297 - DNA, 17 bp, Homo Sapiens
accgagcggaaacacca

SEQ ID NO: 64298 - DNA, 16 bp, Homo Sapiens
accggagatgaaaacc

SEQ ID NO: 64299 - DNA, 17 bp, Homo Sapiens
accggagatgaaaacct

SEQ ID NO: 64300 - DNA, 18 bp, Homo Sapiens
accggagatgaaaacctt

SEQ ID NO: 64301 - DNA, 19 bp, Homo Sapiens
accggagatgaaaaccttt

SEQ ID NO: 64302 - DNA, 20 bp, Homo Sapiens
accggagatgaaaacctttt

SEQ ID NO: 64303 - DNA, 21 bp, Homo Sapiens
accggagatgaaaaccttttt

SEQ ID NO: 64304 - DNA, 22 bp, Homo Sapiens
accggagatgaaaacctttttc

SEQ ID NO: 64305 - DNA, 23 bp, Homo Sapiens
accggagatgaaaacctttttcc

SEQ ID NO: 64306 - DNA, 17 bp, Homo Sapiens
accgggcagaagcacca

SEQ ID NO: 64307 - DNA, 16 bp, Homo Sapiens
accgggcggaaacacc

SEQ ID NO: 64308 - DNA, 17 bp, Homo Sapiens
accgggcggaaacacca

SEQ ID NO: 64309 - DNA, 18 bp, Homo Sapiens
acctcagagggggcacca

SEQ ID NO: 64310 - DNA, 16 bp, Homo Sapiens
acctctttacagtgac

SEQ ID NO: 64311 - DNA, 17 bp, Homo Sapiens
acctctttacagtgacc

SEQ ID NO: 64312 - DNA, 18 bp, Homo Sapiens
acctctttacagtgacca

SEQ ID NO: 64313 - DNA, 16 bp, Homo Sapiens
acctgccggggcttcc

SEQ ID NO: 64314 - DNA, 17 bp, Homo Sapiens
acctgccggggcttcca

SEQ ID NO: 64315 - DNA, 19 bp, Homo Sapiens
acctttttccaaggacacc

SEQ ID NO: 64316 - DNA, 20 bp, Homo Sapiens
acctttttccaaggacacca

SEQ ID NO: 64317 - DNA, 17 bp, Homo Sapiens
acgaatgatttcgactc

SEQ ID NO: 64318 - DNA, 18 bp, Homo Sapiens
acgaatgatttcgactca

SEQ ID NO: 64319 - DNA, 19 bp, Homo Sapiens
acgaatgatttcgactcat

SEQ ID NO: 64320 - DNA, 20 bp, Homo Sapiens
acgaatgatttcgactcatt

SEQ ID NO: 64321 - DNA, 22 bp, Homo Sapiens
acgaatgatttcgactcattaa

SEQ ID NO: 64322 - DNA, 23 bp, Homo Sapiens
acgaatgatttcgactcattaaa

SEQ ID NO: 64323 - DNA, 24 bp, Homo Sapiens
acgaatgatttcgactcattaaat

SEQ ID NO: 64324 - DNA, 18 bp, Homo Sapiens
acgaccccttatttaccc

SEQ ID NO: 64325 - DNA, 19 bp, Homo Sapiens
acgaccccttatttacccc

SEQ ID NO: 64326 - DNA, 20 bp, Homo Sapiens
acgaccccttatttacccca

SEQ ID NO: 64327 - DNA, 18 bp, Homo Sapiens
acgatggtttttcatatc

SEQ ID NO: 64328 - DNA, 19 bp, Homo Sapiens
acgatggtttttcatatca

SEQ ID NO: 64329 - DNA, 20 bp, Homo Sapiens
acgatggtttttcatatcat

SEQ ID NO: 64330 - DNA, 19 bp, Homo Sapiens
acgccaaggtcgcgggttc

SEQ ID NO: 64331 - DNA, 16 bp, Homo Sapiens
acgggctcacatcacc

SEQ ID NO: 64332 - DNA, 17 bp, Homo Sapiens
acgggctcacatcaccc

SEQ ID NO: 64333 - DNA, 18 bp, Homo Sapiens
actaagtgtttgtgggtt

SEQ ID NO: 64334 - DNA, 19 bp, Homo Sapiens
actaagtgtttgtgggttt

SEQ ID NO: 64335 - DNA, 17 bp, Homo Sapiens
actcaagttctggtctc

SEQ ID NO: 64336 - DNA, 18 bp, Homo Sapiens
actcaagttctggtctcc

SEQ ID NO: 64337 - DNA, 18 bp, Homo Sapiens
actccaaataaaagtacc

SEQ ID NO: 64338 - DNA, 19 bp, Homo Sapiens
actccaaataaaagtacca

SEQ ID NO: 64339 - DNA, 20 bp, Homo Sapiens
actccagatcagaaggttgc

SEQ ID NO: 64340 - DNA, 17 bp, Homo Sapiens
actcccggtgtgggaac

SEQ ID NO: 64341 - DNA, 18 bp, Homo Sapiens
actcccggtgtgggaacc

SEQ ID NO: 64342 - DNA, 19 bp, Homo Sapiens
actcccggtgtgggaacca

SEQ ID NO: 64343 - DNA, 17 bp, Homo Sapiens
actcctggctggctcgc

SEQ ID NO: 64344 - DNA, 18 bp, Homo Sapiens
actcctggctggctcgcc

SEQ ID NO: 64345 - DNA, 17 bp, Homo Sapiens
actctggactctgaatc

SEQ ID NO: 64346 - DNA, 18 bp, Homo Sapiens
actctggactctgaatcc

SEQ ID NO: 64347 - DNA, 19 bp, Homo Sapiens
actctggactctgaatcca

SEQ ID NO: 64348 - DNA, 21 bp, Homo Sapiens
actctggactctgaatccagc

SEQ ID NO: 64349 - DNA, 19 bp, Homo Sapiens
actcttttagtataaatag

SEQ ID NO: 64350 - DNA, 16 bp, Homo Sapiens
actgtaaagctaactt

SEQ ID NO: 64351 - DNA, 20 bp, Homo Sapiens
actgtaaagctaacttagca

SEQ ID NO: 64352 - DNA, 22 bp, Homo Sapiens
actgtaaagctaacttagcatt

SEQ ID NO: 64353 - DNA, 23 bp, Homo Sapiens
actgtaaagctaacttagcatta

SEQ ID NO: 64354 - DNA, 16 bp, Homo Sapiens
acttaacttgaccgct

SEQ ID NO: 64355 - DNA, 17 bp, Homo Sapiens
acttaacttgaccgctc

SEQ ID NO: 64356 - DNA, 18 bp, Homo Sapiens
acttaacttgaccgctct

SEQ ID NO: 64357 - DNA, 19 bp, Homo Sapiens
acttaacttgaccgctctg

SEQ ID NO: 64358 - DNA, 20 bp, Homo Sapiens
acttaacttgaccgctctga

SEQ ID NO: 64359 - DNA, 21 bp, Homo Sapiens
acttaacttgaccgctctgac

SEQ ID NO: 64360 - DNA, 22 bp, Homo Sapiens
acttaacttgaccgctctgacc

SEQ ID NO: 64361 - DNA, 23 bp, Homo Sapiens
acttaacttgaccgctctgacca

SEQ ID NO: 64362 - DNA, 16 bp, Homo Sapiens
acttacacttaggaga

SEQ ID NO: 64363 - DNA, 17 bp, Homo Sapiens
acttacacttaggagat

SEQ ID NO: 64364 - DNA, 18 bp, Homo Sapiens
acttacacttaggagatt

SEQ ID NO: 64365 - DNA, 19 bp, Homo Sapiens
acttacacttaggagattt

SEQ ID NO: 64366 - DNA, 20 bp, Homo Sapiens
acttacacttaggagatttc

SEQ ID NO: 64367 - DNA, 21 bp, Homo Sapiens
acttacacttaggagatttca

SEQ ID NO: 64368 - DNA, 22 bp, Homo Sapiens
acttacacttaggagatttcaa

SEQ ID NO: 64369 - DNA, 16 bp, Homo Sapiens
acttaggagatttcaa

SEQ ID NO: 64370 - DNA, 17 bp, Homo Sapiens
acttaggagatttcaac

SEQ ID NO: 64371 - DNA, 18 bp, Homo Sapiens
acttaggagatttcaact

SEQ ID NO: 64372 - DNA, 19 bp, Homo Sapiens
acttaggagatttcaactt

SEQ ID NO: 64373 - DNA, 20 bp, Homo Sapiens
acttaggagatttcaactta

SEQ ID NO: 64374 - DNA, 21 bp, Homo Sapiens
acttaggagatttcaacttaa

SEQ ID NO: 64375 - DNA, 16 bp, Homo Sapiens
acttgaccgctctgac

SEQ ID NO: 64376 - DNA, 17 bp, Homo Sapiens
acttgaccgctctgacc

SEQ ID NO: 64377 - DNA, 18 bp, Homo Sapiens
acttgaccgctctgacca

SEQ ID NO: 64378 - DNA, 16 bp, Homo Sapiens
actttacagtcagagg

SEQ ID NO: 64379 - DNA, 18 bp, Homo Sapiens
actttacagtcagaggtt

SEQ ID NO: 64380 - DNA, 19 bp, Homo Sapiens
actttacagtcagaggttc

SEQ ID NO: 64381 - DNA, 20 bp, Homo Sapiens
actttacagtcagaggttca

SEQ ID NO: 64382 - DNA, 24 bp, Homo Sapiens
actttgatagagtaaataatagga

SEQ ID NO: 64383 - DNA, 16 bp, Homo Sapiens
acttttaaaggataac

SEQ ID NO: 64384 - DNA, 17 bp, Homo Sapiens
acttttaaaggataaca

SEQ ID NO: 64385 - DNA, 18 bp, Homo Sapiens
acttttaaaggataacag

SEQ ID NO: 64386 - DNA, 19 bp, Homo Sapiens
acttttaaaggataacagc

SEQ ID NO: 64387 - DNA, 20 bp, Homo Sapiens
acttttaaaggataacagct

SEQ ID NO: 64388 - DNA, 16 bp, Homo Sapiens
actttttctctgacca

SEQ ID NO: 64389 - DNA, 17 bp, Homo Sapiens
agaaagctcacaagaac

SEQ ID NO: 64390 - DNA, 18 bp, Homo Sapiens
agaaagctcacaagaact

SEQ ID NO: 64391 - DNA, 20 bp, Homo Sapiens
agaaagctcacaagaactgc

SEQ ID NO: 64392 - DNA, 21 bp, Homo Sapiens
agaaagctcacaagaactgct

SEQ ID NO: 64393 - DNA, 16 bp, Homo Sapiens
agaaatatgtctgata

SEQ ID NO: 64394 - DNA, 17 bp, Homo Sapiens
agaaatatgtctgataa

SEQ ID NO: 64395 - DNA, 18 bp, Homo Sapiens
agaaatatgtctgataaa

SEQ ID NO: 64396 - DNA, 19 bp, Homo Sapiens
agaaatatgtctgataaaa

SEQ ID NO: 64397 - DNA, 20 bp, Homo Sapiens
agaaatatgtctgataaaag

SEQ ID NO: 64398 - DNA, 21 bp, Homo Sapiens
agaaatatgtctgataaaaga

SEQ ID NO: 64399 - DNA, 16 bp, Homo Sapiens
agaaatttaggttaaa

SEQ ID NO: 64400 - DNA, 17 bp, Homo Sapiens
agaaatttaggttaaat

SEQ ID NO: 64401 - DNA, 18 bp, Homo Sapiens
agaaatttaggttaaata

SEQ ID NO: 64402 - DNA, 19 bp, Homo Sapiens
agaaatttaggttaaatac

SEQ ID NO: 64403 - DNA, 17 bp, Homo Sapiens
agaactgctaactcatg

SEQ ID NO: 64404 - DNA, 18 bp, Homo Sapiens
agaactgctaactcatgc

SEQ ID NO: 64405 - DNA, 19 bp, Homo Sapiens
agaactgctaactcatgcc

SEQ ID NO: 64406 - DNA, 20 bp, Homo Sapiens
agaactgctaactcatgccc

SEQ ID NO: 64407 - DNA, 22 bp, Homo Sapiens
agaactgctaactcatgccccc

SEQ ID NO: 64408 - DNA, 17 bp, Homo Sapiens
agaagattgagggttcg

SEQ ID NO: 64409 - DNA, 17 bp, Homo Sapiens
agaagattgcaggttcg

SEQ ID NO: 64410 - DNA, 23 bp, Homo Sapiens
agaatcttagctttgggtgctaa

SEQ ID NO: 64411 - DNA, 16 bp, Homo Sapiens
agaccaagagccttca

SEQ ID NO: 64412 - DNA, 22 bp, Homo Sapiens
agaccggggttcaattccccga

SEQ ID NO: 64413 - DNA, 17 bp, Homo Sapiens
agacgggctcacatcac

SEQ ID NO: 64414 - DNA, 18 bp, Homo Sapiens
agacgggctcacatcacc

SEQ ID NO: 64415 - DNA, 19 bp, Homo Sapiens
agacgggctcacatcaccc

SEQ ID NO: 64416 - DNA, 20 bp, Homo Sapiens
agactcaagttctggtctcc

SEQ ID NO: 64417 - DNA, 23 bp, Homo Sapiens
agactcaagttctggtctccgga

SEQ ID NO: 64418 - DNA, 24 bp, Homo Sapiens
agactcaagttctggtctccggat

SEQ ID NO: 64419 - DNA, 16 bp, Homo Sapiens
agactttttctctgac

SEQ ID NO: 64420 - DNA, 17 bp, Homo Sapiens
agactttttctctgacc

SEQ ID NO: 64421 - DNA, 18 bp, Homo Sapiens
agactttttctctgacca

SEQ ID NO: 64422 - DNA, 17 bp, Homo Sapiens
agagaatagtttaaatt

SEQ ID NO: 64423 - DNA, 16 bp, Homo Sapiens
agagtaaataatagga

SEQ ID NO: 64424 - DNA, 18 bp, Homo Sapiens
agagtaaataataggagc

SEQ ID NO: 64425 - DNA, 16 bp, Homo Sapiens
agagtgtagcttaaca

SEQ ID NO: 64426 - DNA, 17 bp, Homo Sapiens
agagtgtagcttaacac

SEQ ID NO: 64427 - DNA, 18 bp, Homo Sapiens
agagtgtagcttaacaca

SEQ ID NO: 64428 - DNA, 24 bp, Homo Sapiens
agagtgtagcttaacacaaagcac

SEQ ID NO: 64429 - DNA, 25 bp, Homo Sapiens
agagtgtagcttaacacaaagcacc

SEQ ID NO: 64430 - DNA, 16 bp, Homo Sapiens
agattaagagaaccaa

SEQ ID NO: 64431 - DNA, 17 bp, Homo Sapiens
agattaagagaaccaac

SEQ ID NO: 64432 - DNA, 18 bp, Homo Sapiens
agattaagagaaccaaca

SEQ ID NO: 64433 - DNA, 19 bp, Homo Sapiens
agattaagagaaccaacac

SEQ ID NO: 64434 - DNA, 20 bp, Homo Sapiens
agattaagagaaccaacacc

SEQ ID NO: 64435 - DNA, 20 bp, Homo Sapiens
agattgagggttcgagtccc

SEQ ID NO: 64436 - DNA, 21 bp, Homo Sapiens
agattgagggttcgagtccct

SEQ ID NO: 64437 - DNA, 23 bp, Homo Sapiens
agattgagggttcgagtcccttc

SEQ ID NO: 64438 - DNA, 24 bp, Homo Sapiens
agattgagggttcgagtcccttcg

SEQ ID NO: 64439 - DNA, 23 bp, Homo Sapiens
agattgcaggttcgagtcctgcc

SEQ ID NO: 64440 - DNA, 16 bp, Homo Sapiens
agattgtgaatctgac

SEQ ID NO: 64441 - DNA, 17 bp, Homo Sapiens
agattgtgaatctgaca

SEQ ID NO: 64442 - DNA, 18 bp, Homo Sapiens
agattgtgaatctgacaa

SEQ ID NO: 64443 - DNA, 19 bp, Homo Sapiens
agattgtgaatctgacaac

SEQ ID NO: 64444 - DNA, 20 bp, Homo Sapiens
agattgtgaatctgacaaca

SEQ ID NO: 64445 - DNA, 21 bp, Homo Sapiens
agattgtgaatctgacaacag

SEQ ID NO: 64446 - DNA, 22 bp, Homo Sapiens
agattgtgaatctgacaacaga

SEQ ID NO: 64447 - DNA, 21 bp, Homo Sapiens
agatttcaacttaacttgacc

SEQ ID NO: 64448 - DNA, 18 bp, Homo Sapiens
agcacccaacttacactt

SEQ ID NO: 64449 - DNA, 19 bp, Homo Sapiens
agcacccaacttacactta

SEQ ID NO: 64450 - DNA, 21 bp, Homo Sapiens
agcacccaacttacacttagg

SEQ ID NO: 64451 - DNA, 16 bp, Homo Sapiens
agcactctggactctg

SEQ ID NO: 64452 - DNA, 17 bp, Homo Sapiens
agcactctggactctga

SEQ ID NO: 64453 - DNA, 20 bp, Homo Sapiens
agcactctggactctgaatc

SEQ ID NO: 64454 - DNA, 21 bp, Homo Sapiens
agcactctggactctgaatcc

SEQ ID NO: 64455 - DNA, 22 bp, Homo Sapiens
agcactctggactctgaatcca

SEQ ID NO: 64456 - DNA, 19 bp, Homo Sapiens
agcatgagactcttaatct

SEQ ID NO: 64457 - DNA, 18 bp, Homo Sapiens
agcatgggactcttaatc

SEQ ID NO: 64458 - DNA, 19 bp, Homo Sapiens
agcatgggactcttaatcc

SEQ ID NO: 64459 - DNA, 20 bp, Homo Sapiens
agcatgggactcttaatccc

SEQ ID NO: 64460 - DNA, 16 bp, Homo Sapiens
agcattaaccttttaa

SEQ ID NO: 64461 - DNA, 17 bp, Homo Sapiens
agcattaaccttttaag

SEQ ID NO: 64462 - DNA, 18 bp, Homo Sapiens
agcattaaccttttaagt

SEQ ID NO: 64463 - DNA, 19 bp, Homo Sapiens
agcattaaccttttaagtt

SEQ ID NO: 64464 - DNA, 20 bp, Homo Sapiens
agcattaaccttttaagtta

SEQ ID NO: 64465 - DNA, 18 bp, Homo Sapiens
agccagggattgtgggtt

SEQ ID NO: 64466 - DNA, 19 bp, Homo Sapiens
agccagggattgtgggttc

SEQ ID NO: 64467 - DNA, 20 bp, Homo Sapiens
agccagggattgtgggttcg

SEQ ID NO: 64468 - DNA, 19 bp, Homo Sapiens
agcccacccagggacgcca

SEQ ID NO: 64469 - DNA, 17 bp, Homo Sapiens
agcccggtaatcgcata

SEQ ID NO: 64470 - DNA, 17 bp, Homo Sapiens
agccctcagtaagttgc

SEQ ID NO: 64471 - DNA, 18 bp, Homo Sapiens
agccctcagtaagttgca

SEQ ID NO: 64472 - DNA, 19 bp, Homo Sapiens
agccgtgatcgtatagtgg

SEQ ID NO: 64473 - DNA, 21 bp, Homo Sapiens
agccgtgatcgtatagtggtt

SEQ ID NO: 64474 - DNA, 23 bp, Homo Sapiens
agccgtgatcgtatagtggttag

SEQ ID NO: 64475 - DNA, 24 bp, Homo Sapiens
agccgtgatcgtatagtggttagt

SEQ ID NO: 64476 - DNA, 18 bp, Homo Sapiens
agctaaataagctatcgg

SEQ ID NO: 64477 - DNA, 16 bp, Homo Sapiens
agctatccattggtct

SEQ ID NO: 64478 - DNA, 17 bp, Homo Sapiens
agctatcgggcccatac

SEQ ID NO: 64479 - DNA, 18 bp, Homo Sapiens
agctatcgggcccatacc

SEQ ID NO: 64480 - DNA, 19 bp, Homo Sapiens
agctatcgggcccataccc

SEQ ID NO: 64481 - DNA, 20 bp, Homo Sapiens
agctatcgggcccatacccc

SEQ ID NO: 64482 - DNA, 22 bp, Homo Sapiens
agctatcgggcccataccccga

SEQ ID NO: 64483 - DNA, 23 bp, Homo Sapiens
agctatcgggcccataccccgaa

SEQ ID NO: 64484 - DNA, 16 bp, Homo Sapiens
agctcacaagaactgc

SEQ ID NO: 64485 - DNA, 17 bp, Homo Sapiens
agctcacaagaactgct

SEQ ID NO: 64486 - DNA, 18 bp, Homo Sapiens
agctcacaagaactgcta

SEQ ID NO: 64487 - DNA, 19 bp, Homo Sapiens
agctcacaagaactgctaa

SEQ ID NO: 64488 - DNA, 20 bp, Homo Sapiens
agctcacaagaactgctaac

SEQ ID NO: 64489 - DNA, 21 bp, Homo Sapiens
agctcacaagaactgctaact

SEQ ID NO: 64490 - DNA, 22 bp, Homo Sapiens
agctcacaagaactgctaactc

SEQ ID NO: 64491 - DNA, 23 bp, Homo Sapiens
agctcacaagaactgctaactca

SEQ ID NO: 64492 - DNA, 24 bp, Homo Sapiens
agctcagtcggtagagcatgggac

SEQ ID NO: 64493 - DNA, 25 bp, Homo Sapiens
agctcagtcggtagagcatgggact

SEQ ID NO: 64494 - DNA, 16 bp, Homo Sapiens
agctccgaggtgattt

SEQ ID NO: 64495 - DNA, 17 bp, Homo Sapiens
agctccgaggtgatttt

SEQ ID NO: 64496 - DNA, 18 bp, Homo Sapiens
agctccgaggtgattttc

SEQ ID NO: 64497 - DNA, 19 bp, Homo Sapiens
agctccgaggtgattttca

SEQ ID NO: 64498 - DNA, 20 bp, Homo Sapiens
agctccgaggtgattttcat

SEQ ID NO: 64499 - DNA, 21 bp, Homo Sapiens
agctccgaggtgattttcata

SEQ ID NO: 64500 - DNA, 23 bp, Homo Sapiens
agctccgaggtgattttcatatt

SEQ ID NO: 64501 - DNA, 24 bp, Homo Sapiens
agctccgaggtgattttcatattg

SEQ ID NO: 64502 - DNA, 25 bp, Homo Sapiens
agctccgaggtgattttcatattga

SEQ ID NO: 64503 - DNA, 16 bp, Homo Sapiens
agcttaaaccccctta

SEQ ID NO: 64504 - DNA, 24 bp, Homo Sapiens
agcttaaacccccttatttctacc

SEQ ID NO: 64505 - DNA, 16 bp, Homo Sapiens
aggagatcctgggttc

SEQ ID NO: 64506 - DNA, 17 bp, Homo Sapiens
aggagatcctgggttcg

SEQ ID NO: 64507 - DNA, 16 bp, Homo Sapiens
aggagatttcaactta

SEQ ID NO: 64508 - DNA, 17 bp, Homo Sapiens
aggagatttcaacttaa

SEQ ID NO: 64509 - DNA, 18 bp, Homo Sapiens
aggagatttcaacttaac

SEQ ID NO: 64510 - DNA, 19 bp, Homo Sapiens
aggagatttcaacttaact

SEQ ID NO: 64511 - DNA, 24 bp, Homo Sapiens
aggagatttcaacttaacttgacc

SEQ ID NO: 64512 - DNA, 16 bp, Homo Sapiens
aggagcttaaaccccc

SEQ ID NO: 64513 - DNA, 19 bp, Homo Sapiens
aggagcttaaaccccctta

SEQ ID NO: 64514 - DNA, 21 bp, Homo Sapiens
aggatggccgagcggtctaag

SEQ ID NO: 64515 - DNA, 19 bp, Homo Sapiens
aggatggccgagtggtcta

SEQ ID NO: 64516 - DNA, 21 bp, Homo Sapiens
aggatggccgagtggtctaag

SEQ ID NO: 64517 - DNA, 16 bp, Homo Sapiens
aggattcggcgctctc

SEQ ID NO: 64518 - DNA, 19 bp, Homo Sapiens
aggcctctttttaccacca

SEQ ID NO: 64519 - DNA, 19 bp, Homo Sapiens
agggatgggttcgattctc

SEQ ID NO: 64520 - DNA, 16 bp, Homo Sapiens
agggattgtgggttcg

SEQ ID NO: 64521 - DNA, 22 bp, Homo Sapiens
agggattgtgggttcgagtccc

SEQ ID NO: 64522 - DNA, 20 bp, Homo Sapiens
agggccagtggcgcaatgga

SEQ ID NO: 64523 - DNA, 17 bp, Homo Sapiens
aggggtatgattctcgc

SEQ ID NO: 64524 - DNA, 18 bp, Homo Sapiens
aggggtatgattctcgct

SEQ ID NO: 64525 - DNA, 22 bp, Homo Sapiens
aggggtatgattctcgctttgg

SEQ ID NO: 64526 - DNA, 17 bp, Homo Sapiens
aggggtatgattctcgg

SEQ ID NO: 64527 - DNA, 18 bp, Homo Sapiens
aggggtatgattctcggt

SEQ ID NO: 64528 - DNA, 22 bp, Homo Sapiens
aggggtatgattctcggtttgg

SEQ ID NO: 64529 - DNA, 16 bp, Homo Sapiens
aggggtcgcgagttca

SEQ ID NO: 64530 - DNA, 25 bp, Homo Sapiens
agggtcgtgggttcgagccccacgt

SEQ ID NO: 64531 - DNA, 21 bp, Homo Sapiens
aggtcagctaaataagctatc

SEQ ID NO: 64532 - DNA, 24 bp, Homo Sapiens
aggtcagctaaataagctatcggg

SEQ ID NO: 64533 - DNA, 18 bp, Homo Sapiens
aggtcgcgggttcgatcc

SEQ ID NO: 64534 - DNA, 19 bp, Homo Sapiens
aggtcgcgggttcgatccc

SEQ ID NO: 64535 - DNA, 23 bp, Homo Sapiens
aggtcgcgggttcgatccccgta

SEQ ID NO: 64536 - DNA, 19 bp, Homo Sapiens
aggtgattttcatattgaa

SEQ ID NO: 64537 - DNA, 20 bp, Homo Sapiens
aggtgattttcatattgaat

SEQ ID NO: 64538 - DNA, 21 bp, Homo Sapiens
aggtgattttcatattgaatt

SEQ ID NO: 64539 - DNA, 19 bp, Homo Sapiens
aggtggcacggagaatttt

SEQ ID NO: 64540 - DNA, 23 bp, Homo Sapiens
aggttccgggttcgagtcccggc

SEQ ID NO: 64541 - DNA, 16 bp, Homo Sapiens
aggttcgactcctggc

SEQ ID NO: 64542 - DNA, 20 bp, Homo Sapiens
aggttcgactcctggctggc

SEQ ID NO: 64543 - DNA, 16 bp, Homo Sapiens
aggttcgagtcctgcc

SEQ ID NO: 64544 - DNA, 23 bp, Homo Sapiens
aggttgtgggttcgagtcccacc

SEQ ID NO: 64545 - DNA, 16 bp, Homo Sapiens
agtaaataataggagc

SEQ ID NO: 64546 - DNA, 19 bp, Homo Sapiens
agtaaataataggagctta

SEQ ID NO: 64547 - DNA, 20 bp, Homo Sapiens
agtaaataataggagcttaa

SEQ ID NO: 64548 - DNA, 22 bp, Homo Sapiens
agtaaataataggagcttaaac

SEQ ID NO: 64549 - DNA, 16 bp, Homo Sapiens
agtaaggtcagctaaa

SEQ ID NO: 64550 - DNA, 17 bp, Homo Sapiens
agtaaggtcagctaaat

SEQ ID NO: 64551 - DNA, 18 bp, Homo Sapiens
agtaaggtcagctaaata

SEQ ID NO: 64552 - DNA, 19 bp, Homo Sapiens
agtaaggtcagctaaataa

SEQ ID NO: 64553 - DNA, 20 bp, Homo Sapiens
agtaaggtcagctaaataag

SEQ ID NO: 64554 - DNA, 21 bp, Homo Sapiens
agtaaggtcagctaaataagc

SEQ ID NO: 64555 - DNA, 22 bp, Homo Sapiens
agtaaggtcagctaaataagct

SEQ ID NO: 64556 - DNA, 25 bp, Homo Sapiens
agtaaggtcagctaaataagctatc

SEQ ID NO: 64557 - DNA, 16 bp, Homo Sapiens
agtaccgttaacttcc

SEQ ID NO: 64558 - DNA, 16 bp, Homo Sapiens
agtactctgcgttgtg

SEQ ID NO: 64559 - DNA, 17 bp, Homo Sapiens
agtactctgcgttgtgg

SEQ ID NO: 64560 - DNA, 18 bp, Homo Sapiens
agtactctgcgttgtggc

SEQ ID NO: 64561 - DNA, 18 bp, Homo Sapiens
agtcagaggttcaattcc

SEQ ID NO: 64562 - DNA, 20 bp, Homo Sapiens
agtcagaggttcaattcctc

SEQ ID NO: 64563 - DNA, 18 bp, Homo Sapiens
agtcccacccggggtacc

SEQ ID NO: 64564 - DNA, 18 bp, Homo Sapiens
agtcccattggtctagcc

SEQ ID NO: 64565 - DNA, 19 bp, Homo Sapiens
agtcccattggtctagcca

SEQ ID NO: 64566 - DNA, 18 bp, Homo Sapiens
agtccctgttcgggcgcc

SEQ ID NO: 64567 - DNA, 16 bp, Homo Sapiens
agtccgtgcgagaata

SEQ ID NO: 64568 - DNA, 17 bp, Homo Sapiens
agtccgtgcgagaatac

SEQ ID NO: 64569 - DNA, 18 bp, Homo Sapiens
agtccgtgcgagaatacc

SEQ ID NO: 64570 - DNA, 19 bp, Homo Sapiens
agtccgtgcgagaatacca

SEQ ID NO: 64571 - DNA, 16 bp, Homo Sapiens
agtcggtagagcatca

SEQ ID NO: 64572 - DNA, 17 bp, Homo Sapiens
agtcggtagagcatcag

SEQ ID NO: 64573 - DNA, 18 bp, Homo Sapiens
agtcggtagagcatcaga

SEQ ID NO: 64574 - DNA, 19 bp, Homo Sapiens
agtcggtagagcatcagac

SEQ ID NO: 64575 - DNA, 20 bp, Homo Sapiens
agtcggtagagcatcagact

SEQ ID NO: 64576 - DNA, 16 bp, Homo Sapiens
agtcggtagagcatga

SEQ ID NO: 64577 - DNA, 17 bp, Homo Sapiens
agtcggtagagcatgag

SEQ ID NO: 64578 - DNA, 18 bp, Homo Sapiens
agtcggtagagcatgaga

SEQ ID NO: 64579 - DNA, 19 bp, Homo Sapiens
agtcggtagagcatgagac

SEQ ID NO: 64580 - DNA, 20 bp, Homo Sapiens
agtcggtagagcatgagact

SEQ ID NO: 64581 - DNA, 21 bp, Homo Sapiens
agtcggtagagcatgagactc

SEQ ID NO: 64582 - DNA, 22 bp, Homo Sapiens
agtcggtagagcatgagactct

SEQ ID NO: 64583 - DNA, 23 bp, Homo Sapiens
agtcggtagagcatgagactctt

SEQ ID NO: 64584 - DNA, 16 bp, Homo Sapiens
agtcggtagagcatgg

SEQ ID NO: 64585 - DNA, 17 bp, Homo Sapiens
agtcggtagagcatggg

SEQ ID NO: 64586 - DNA, 18 bp, Homo Sapiens
agtcggtagagcatggga

SEQ ID NO: 64587 - DNA, 19 bp, Homo Sapiens
agtcggtagagcatgggac

SEQ ID NO: 64588 - DNA, 20 bp, Homo Sapiens
agtcggtagagcatgggact

SEQ ID NO: 64589 - DNA, 21 bp, Homo Sapiens
agtcggtagagcatgggactc

SEQ ID NO: 64590 - DNA, 22 bp, Homo Sapiens
agtcggtagagcatgggactct

SEQ ID NO: 64591 - DNA, 22 bp, Homo Sapiens
agtctcataatctgaaggtcgt

SEQ ID NO: 64592 - DNA, 19 bp, Homo Sapiens
agtctcttcgggggcgtgg

SEQ ID NO: 64593 - DNA, 23 bp, Homo Sapiens
agtctcttcgggggcgtgggttc

SEQ ID NO: 64594 - DNA, 18 bp, Homo Sapiens
agtgaagcattggactgt

SEQ ID NO: 64595 - DNA, 19 bp, Homo Sapiens
agtgaagcattggactgta

SEQ ID NO: 64596 - DNA, 18 bp, Homo Sapiens
agtggcgcagcggaagcg

SEQ ID NO: 64597 - DNA, 19 bp, Homo Sapiens
agtggcgcagcggaagcgt

SEQ ID NO: 64598 - DNA, 22 bp, Homo Sapiens
agtggcgcagcggaagcgtgct

SEQ ID NO: 64599 - DNA, 18 bp, Homo Sapiens
agtggctgatttgcgttc

SEQ ID NO: 64600 - DNA, 17 bp, Homo Sapiens
agtggtagaattctcgc

SEQ ID NO: 64601 - DNA, 18 bp, Homo Sapiens
agtggtagaattctcgcc

SEQ ID NO: 64602 - DNA, 19 bp, Homo Sapiens
agtggtagaattctcgcct

SEQ ID NO: 64603 - DNA, 20 bp, Homo Sapiens
agtggtagaattctcgcctg

SEQ ID NO: 64604 - DNA, 21 bp, Homo Sapiens
agtggtagaattctcgcctgc

SEQ ID NO: 64605 - DNA, 22 bp, Homo Sapiens
agtggtagaattctcgcctgcc

SEQ ID NO: 64606 - DNA, 17 bp, Homo Sapiens
agtggtagagcatttga

SEQ ID NO: 64607 - DNA, 19 bp, Homo Sapiens
agtggtagagcatttgact

SEQ ID NO: 64608 - DNA, 21 bp, Homo Sapiens
agtggtagagcatttgactgc

SEQ ID NO: 64609 - DNA, 17 bp, Homo Sapiens
agtggttaggattcggc

SEQ ID NO: 64610 - DNA, 18 bp, Homo Sapiens
agtggttaggattcggcg

SEQ ID NO: 64611 - DNA, 19 bp, Homo Sapiens
agtggttaggattcggcgc

SEQ ID NO: 64612 - DNA, 20 bp, Homo Sapiens
agtggttaggattcggcgct

SEQ ID NO: 64613 - DNA, 21 bp, Homo Sapiens
agtggttaggattcggcgctc

SEQ ID NO: 64614 - DNA, 17 bp, Homo Sapiens
agtggttagtactctgc

SEQ ID NO: 64615 - DNA, 18 bp, Homo Sapiens
agtggttagtactctgcg

SEQ ID NO: 64616 - DNA, 20 bp, Homo Sapiens
agtggttagtactctgcgtt

SEQ ID NO: 64617 - DNA, 21 bp, Homo Sapiens
agtggttagtactctgcgttg

SEQ ID NO: 64618 - DNA, 20 bp, Homo Sapiens
agttaaagactttttctctg

SEQ ID NO: 64619 - DNA, 21 bp, Homo Sapiens
agttaaagactttttctctga

SEQ ID NO: 64620 - DNA, 22 bp, Homo Sapiens
agttaaagactttttctctgac

SEQ ID NO: 64621 - DNA, 23 bp, Homo Sapiens
agttaaagactttttctctgacc

SEQ ID NO: 64622 - DNA, 17 bp, Homo Sapiens
agttaaagattaagaga

SEQ ID NO: 64623 - DNA, 18 bp, Homo Sapiens
agttaaagattaagagaa

SEQ ID NO: 64624 - DNA, 19 bp, Homo Sapiens
agttaaagattaagagaac

SEQ ID NO: 64625 - DNA, 20 bp, Homo Sapiens
agttaaagattaagagaacc

SEQ ID NO: 64626 - DNA, 21 bp, Homo Sapiens
agttaaagattaagagaacca

SEQ ID NO: 64627 - DNA, 21 bp, Homo Sapiens
agttcaaatctcgctggggcc

SEQ ID NO: 64628 - DNA, 18 bp, Homo Sapiens
agttcaaatctcggtgga

SEQ ID NO: 64629 - DNA, 19 bp, Homo Sapiens
agttcaaatctcggtggaa

SEQ ID NO: 64630 - DNA, 20 bp, Homo Sapiens
agttcaaatctcggtggaac

SEQ ID NO: 64631 - DNA, 21 bp, Homo Sapiens
agttcaaatctcggtggaacc

SEQ ID NO: 64632 - DNA, 20 bp, Homo Sapiens
agttcaaatctcggtgggac

SEQ ID NO: 64633 - DNA, 16 bp, Homo Sapiens
agttctggtctccgga

SEQ ID NO: 64634 - DNA, 16 bp, Homo Sapiens
agttgacccgggttcg

SEQ ID NO: 64635 - DNA, 19 bp, Homo Sapiens
agttgcaatacttaatttc

SEQ ID NO: 64636 - DNA, 22 bp, Homo Sapiens
agttgcaatacttaatttctgc

SEQ ID NO: 64637 - DNA, 23 bp, Homo Sapiens
agttgcaatacttaatttctgcc

SEQ ID NO: 64638 - DNA, 24 bp, Homo Sapiens
agttgcaatacttaatttctgcca

SEQ ID NO: 64639 - DNA, 20 bp, Homo Sapiens
agtttaaccaaaacatcaga

SEQ ID NO: 64640 - DNA, 24 bp, Homo Sapiens
agttttgacaacattcaaaaaaga

SEQ ID NO: 64641 - DNA, 20 bp, Homo Sapiens
ataacagctatccattggtc

SEQ ID NO: 64642 - DNA, 21 bp, Homo Sapiens
ataacagctatccattggtct

SEQ ID NO: 64643 - DNA, 16 bp, Homo Sapiens
ataacccagaggtcga

SEQ ID NO: 64644 - DNA, 19 bp, Homo Sapiens
ataacccagaggtcgatgg

SEQ ID NO: 64645 - DNA, 20 bp, Homo Sapiens
ataacccagaggtcgatgga

SEQ ID NO: 64646 - DNA, 21 bp, Homo Sapiens
ataacccagaggtcgatggat

SEQ ID NO: 64647 - DNA, 23 bp, Homo Sapiens
ataacccagaggtcgatggatcg

SEQ ID NO: 64648 - DNA, 16 bp, Homo Sapiens
ataagctatcgggccc

SEQ ID NO: 64649 - DNA, 17 bp, Homo Sapiens
ataagctatcgggccca

SEQ ID NO: 64650 - DNA, 18 bp, Homo Sapiens
ataagctatcgggcccat

SEQ ID NO: 64651 - DNA, 17 bp, Homo Sapiens
ataataggagcttaaac

SEQ ID NO: 64652 - DNA, 18 bp, Homo Sapiens
ataataggagcttaaacc

SEQ ID NO: 64653 - DNA, 19 bp, Homo Sapiens
ataataggagcttaaaccc

SEQ ID NO: 64654 - DNA, 20 bp, Homo Sapiens
ataataggagcttaaacccc

SEQ ID NO: 64655 - DNA, 21 bp, Homo Sapiens
ataataggagcttaaaccccc

SEQ ID NO: 64656 - DNA, 19 bp, Homo Sapiens
ataatcatatttaccaacc

SEQ ID NO: 64657 - DNA, 20 bp, Homo Sapiens
ataatcatatttaccaacca

SEQ ID NO: 64658 - DNA, 19 bp, Homo Sapiens
atacagaccaagagccttc

SEQ ID NO: 64659 - DNA, 20 bp, Homo Sapiens
atacagaccaagagccttca

SEQ ID NO: 64660 - DNA, 19 bp, Homo Sapiens
atacccttcccgtactacc

SEQ ID NO: 64661 - DNA, 20 bp, Homo Sapiens
atacccttcccgtactacca

SEQ ID NO: 64662 - DNA, 16 bp, Homo Sapiens
atacttaatttctgcc

SEQ ID NO: 64663 - DNA, 17 bp, Homo Sapiens
atacttaatttctgcca

SEQ ID NO: 64664 - DNA, 18 bp, Homo Sapiens
atagagtaaataatagga

SEQ ID NO: 64665 - DNA, 19 bp, Homo Sapiens
atagagtaaataataggag

SEQ ID NO: 64666 - DNA, 20 bp, Homo Sapiens
atagagtaaataataggagc

SEQ ID NO: 64667 - DNA, 16 bp, Homo Sapiens
ataggagcttaaaccc

SEQ ID NO: 64668 - DNA, 17 bp, Homo Sapiens
ataggagcttaaacccc

SEQ ID NO: 64669 - DNA, 18 bp, Homo Sapiens
atagtaccgttaacttcc

SEQ ID NO: 64670 - DNA, 19 bp, Homo Sapiens
atagtggttagtactctgc

SEQ ID NO: 64671 - DNA, 22 bp, Homo Sapiens
atagtttaaccaaaacatcaga

SEQ ID NO: 64672 - DNA, 19 bp, Homo Sapiens
atatcattggtcgtggttg

SEQ ID NO: 64673 - DNA, 20 bp, Homo Sapiens
atatcattggtcgtggttgt

SEQ ID NO: 64674 - DNA, 21 bp, Homo Sapiens
atatcattggtcgtggttgta

SEQ ID NO: 64675 - DNA, 22 bp, Homo Sapiens
atatcattggtcgtggttgtag

SEQ ID NO: 64676 - DNA, 24 bp, Homo Sapiens
atatcattggtcgtggttgtagtc

SEQ ID NO: 64677 - DNA, 25 bp, Homo Sapiens
atatcattggtcgtggttgtagtcc

SEQ ID NO: 64678 - DNA, 16 bp, Homo Sapiens
atatgtccgcgtgggt

SEQ ID NO: 64679 - DNA, 17 bp, Homo Sapiens
atatgtccgcgtgggtt

SEQ ID NO: 64680 - DNA, 16 bp, Homo Sapiens
atcaccccataaacac

SEQ ID NO: 64681 - DNA, 17 bp, Homo Sapiens
atcaccccataaacacc

SEQ ID NO: 64682 - DNA, 18 bp, Homo Sapiens
atcaccccataaacacca

SEQ ID NO: 64683 - DNA, 17 bp, Homo Sapiens
atcacgtcggggtcacc

SEQ ID NO: 64684 - DNA, 18 bp, Homo Sapiens
atcacgtcggggtcacca

SEQ ID NO: 64685 - DNA, 19 bp, Homo Sapiens
atcagattgtgaatctgac

SEQ ID NO: 64686 - DNA, 20 bp, Homo Sapiens
atcagattgtgaatctgaca

SEQ ID NO: 64687 - DNA, 16 bp, Homo Sapiens
atcatatttaccaacc

SEQ ID NO: 64688 - DNA, 17 bp, Homo Sapiens
atcatatttaccaacca

SEQ ID NO: 64689 - DNA, 19 bp, Homo Sapiens
atcattggtcgtggttgta

SEQ ID NO: 64690 - DNA, 22 bp, Homo Sapiens
atcattggtcgtggttgtagtc

SEQ ID NO: 64691 - DNA, 18 bp, Homo Sapiens
atccagcgatccgagttc

SEQ ID NO: 64692 - DNA, 19 bp, Homo Sapiens
atccagcgatccgagttca

SEQ ID NO: 64693 - DNA, 17 bp, Homo Sapiens
atccattggtcttaggc

SEQ ID NO: 64694 - DNA, 18 bp, Homo Sapiens
atccattggtcttaggcc

SEQ ID NO: 64695 - DNA, 19 bp, Homo Sapiens
atccattggtcttaggccc

SEQ ID NO: 64696 - DNA, 20 bp, Homo Sapiens
atccattggtcttaggcccc

SEQ ID NO: 64697 - DNA, 21 bp, Homo Sapiens
atccattggtcttaggcccca

SEQ ID NO: 64698 - DNA, 22 bp, Homo Sapiens
atccattggtcttaggccccaa

SEQ ID NO: 64699 - DNA, 16 bp, Homo Sapiens
atcccaccgctgccac

SEQ ID NO: 64700 - DNA, 17 bp, Homo Sapiens
atcccaccgctgccacc

SEQ ID NO: 64701 - DNA, 18 bp, Homo Sapiens
atcccaccgctgccacca

SEQ ID NO: 64702 - DNA, 17 bp, Homo Sapiens
atcccactcctgacacc

SEQ ID NO: 64703 - DNA, 18 bp, Homo Sapiens
atcccactcctgacacca

SEQ ID NO: 64704 - DNA, 17 bp, Homo Sapiens
atcccacttctgacacc

SEQ ID NO: 64705 - DNA, 18 bp, Homo Sapiens
atcccacttctgacacca

SEQ ID NO: 64706 - DNA, 17 bp, Homo Sapiens
atcccagcggggcctcc

SEQ ID NO: 64707 - DNA, 18 bp, Homo Sapiens
atcccagcggggcctcca

SEQ ID NO: 64708 - DNA, 16 bp, Homo Sapiens
atcccagcggtgcctc

SEQ ID NO: 64709 - DNA, 17 bp, Homo Sapiens
atcccagcggtgcctcc

SEQ ID NO: 64710 - DNA, 18 bp, Homo Sapiens
atcccagcggtgcctcca

SEQ ID NO: 64711 - DNA, 18 bp, Homo Sapiens
atcccagtagagcctcca

SEQ ID NO: 64712 - DNA, 17 bp, Homo Sapiens
atcccatcctcgtcgcc

SEQ ID NO: 64713 - DNA, 18 bp, Homo Sapiens
atcccatcctcgtcgcca

SEQ ID NO: 64714 - DNA, 19 bp, Homo Sapiens
atccccggcacctccacca

SEQ ID NO: 64715 - DNA, 19 bp, Homo Sapiens
atccccggcatctccacca

SEQ ID NO: 64716 - DNA, 18 bp, Homo Sapiens
atccccgtacgggccacc

SEQ ID NO: 64717 - DNA, 19 bp, Homo Sapiens
atccccgtacgggccacca

SEQ ID NO: 64718 - DNA, 16 bp, Homo Sapiens
atcccggacgagcccc

SEQ ID NO: 64719 - DNA, 17 bp, Homo Sapiens
atcccggacgagccccc

SEQ ID NO: 64720 - DNA, 18 bp, Homo Sapiens
atcccggacgagccccca

SEQ ID NO: 64721 - DNA, 19 bp, Homo Sapiens
atcccgggtttcggcacca

SEQ ID NO: 64722 - DNA, 18 bp, Homo Sapiens
atccctccgtggttacca

SEQ ID NO: 64723 - DNA, 16 bp, Homo Sapiens
atccgagtcacggcac

SEQ ID NO: 64724 - DNA, 17 bp, Homo Sapiens
atccgagtcacggcacc

SEQ ID NO: 64725 - DNA, 18 bp, Homo Sapiens
atccgagtcacggcacca

SEQ ID NO: 64726 - DNA, 17 bp, Homo Sapiens
atccggctcgaaggacc

SEQ ID NO: 64727 - DNA, 18 bp, Homo Sapiens
atccggctcgaaggacca

SEQ ID NO: 64728 - DNA, 17 bp, Homo Sapiens
atccggctcggaggacc

SEQ ID NO: 64729 - DNA, 18 bp, Homo Sapiens
atccggctcggaggacca

SEQ ID NO: 64730 - DNA, 16 bp, Homo Sapiens
atccgggtgccccctc

SEQ ID NO: 64731 - DNA, 17 bp, Homo Sapiens
atccgggtgccccctcc

SEQ ID NO: 64732 - DNA, 18 bp, Homo Sapiens
atccgggtgccccctcca

SEQ ID NO: 64733 - DNA, 18 bp, Homo Sapiens
atcctatatatcttacca

SEQ ID NO: 64734 - DNA, 17 bp, Homo Sapiens
atcctgccgactacgcc

SEQ ID NO: 64735 - DNA, 18 bp, Homo Sapiens
atcctgccgactacgcca

SEQ ID NO: 64736 - DNA, 18 bp, Homo Sapiens
atcctgctcacagcgcca

SEQ ID NO: 64737 - DNA, 17 bp, Homo Sapiens
atcctgttcgtgacgcc

SEQ ID NO: 64738 - DNA, 18 bp, Homo Sapiens
atcctgttcgtgacgcca

SEQ ID NO: 64739 - DNA, 18 bp, Homo Sapiens
atcgggcccataccccga

SEQ ID NO: 64740 - DNA, 20 bp, Homo Sapiens
atctaaaggtccctggttcg

SEQ ID NO: 64741 - DNA, 21 bp, Homo Sapiens
atctaaaggtccctggttcga

SEQ ID NO: 64742 - DNA, 22 bp, Homo Sapiens
atctaaaggtccctggttcgat

SEQ ID NO: 64743 - DNA, 23 bp, Homo Sapiens
atctaaaggtccctggttcgatc

SEQ ID NO: 64744 - DNA, 19 bp, Homo Sapiens
atctcagggtcgtgggttc

SEQ ID NO: 64745 - DNA, 16 bp, Homo Sapiens
atctcgctggggcctc

SEQ ID NO: 64746 - DNA, 17 bp, Homo Sapiens
atctcgctggggcctcc

SEQ ID NO: 64747 - DNA, 18 bp, Homo Sapiens
atctcgctggggcctcca

SEQ ID NO: 64748 - DNA, 16 bp, Homo Sapiens
atctcggtggaacctc

SEQ ID NO: 64749 - DNA, 17 bp, Homo Sapiens
atctcggtggaacctcc

SEQ ID NO: 64750 - DNA, 18 bp, Homo Sapiens
atctcggtggaacctcca

SEQ ID NO: 64751 - DNA, 16 bp, Homo Sapiens
atctcggtgggacctc

SEQ ID NO: 64752 - DNA, 17 bp, Homo Sapiens
atctcggtgggacctcc

SEQ ID NO: 64753 - DNA, 18 bp, Homo Sapiens
atctcggtgggacctcca

SEQ ID NO: 64754 - DNA, 17 bp, Homo Sapiens
atctgacaacagaggct

SEQ ID NO: 64755 - DNA, 20 bp, Homo Sapiens
atctgacaacagaggcttac

SEQ ID NO: 64756 - DNA, 18 bp, Homo Sapiens
atctgagggtccagggtt

SEQ ID NO: 64757 - DNA, 20 bp, Homo Sapiens
atgaaaacctttttccaagg

SEQ ID NO: 64758 - DNA, 17 bp, Homo Sapiens
atgagactcttaatctc

SEQ ID NO: 64759 - DNA, 19 bp, Homo Sapiens
atgataatcatatttacca

SEQ ID NO: 64760 - DNA, 20 bp, Homo Sapiens
atgataatcatatttaccaa

SEQ ID NO: 64761 - DNA, 21 bp, Homo Sapiens
atgataatcatatttaccaac

SEQ ID NO: 64762 - DNA, 22 bp, Homo Sapiens
atgataatcatatttaccaacc

SEQ ID NO: 64763 - DNA, 23 bp, Homo Sapiens
atgataatcatatttaccaacca

SEQ ID NO: 64764 - DNA, 23 bp, Homo Sapiens
atgattctcgcttcgggtgcgag

SEQ ID NO: 64765 - DNA, 24 bp, Homo Sapiens
atgattctcggtttgggtccgaga

SEQ ID NO: 64766 - DNA, 17 bp, Homo Sapiens
atgcccccatgtctaac

SEQ ID NO: 64767 - DNA, 18 bp, Homo Sapiens
atgcccccatgtctaaca

SEQ ID NO: 64768 - DNA, 21 bp, Homo Sapiens
atgcccccatgtctaacaaca

SEQ ID NO: 64769 - DNA, 25 bp, Homo Sapiens
atgcccccatgtctaacaacatggc

SEQ ID NO: 64770 - DNA, 17 bp, Homo Sapiens
atggaggccatggggtt

SEQ ID NO: 64771 - DNA, 19 bp, Homo Sapiens
atggataaggcatcagcct

SEQ ID NO: 64772 - DNA, 21 bp, Homo Sapiens
atggataaggcatcagcctcc

SEQ ID NO: 64773 - DNA, 16 bp, Homo Sapiens
atggatagcgcattgg

SEQ ID NO: 64774 - DNA, 17 bp, Homo Sapiens
atgggactcttaatccc

SEQ ID NO: 64775 - DNA, 19 bp, Homo Sapiens
atggggtgtgataggtggc

SEQ ID NO: 64776 - DNA, 25 bp, Homo Sapiens
atgggtggttcagtggtagaattct

SEQ ID NO: 64777 - DNA, 17 bp, Homo Sapiens
atggtggagttaaagac

SEQ ID NO: 64778 - DNA, 18 bp, Homo Sapiens
atggtggagttaaagact

SEQ ID NO: 64779 - DNA, 19 bp, Homo Sapiens
atggtggagttaaagactt

SEQ ID NO: 64780 - DNA, 20 bp, Homo Sapiens
atggtggagttaaagacttt

SEQ ID NO: 64781 - DNA, 24 bp, Homo Sapiens
atggtgtaatggttagcactctgg

SEQ ID NO: 64782 - DNA, 16 bp, Homo Sapiens
atggttagcactctgg

SEQ ID NO: 64783 - DNA, 17 bp, Homo Sapiens
atggttagcactctgga

SEQ ID NO: 64784 - DNA, 19 bp, Homo Sapiens
atggttagcactctggact

SEQ ID NO: 64785 - DNA, 20 bp, Homo Sapiens
atggttagcactctggactc

SEQ ID NO: 64786 - DNA, 16 bp, Homo Sapiens
atgtctaacaacatgg

SEQ ID NO: 64787 - DNA, 17 bp, Homo Sapiens
atgtctaacaacatggc

SEQ ID NO: 64788 - DNA, 18 bp, Homo Sapiens
atgtctaacaacatggct

SEQ ID NO: 64789 - DNA, 19 bp, Homo Sapiens
atgtctaacaacatggctt

SEQ ID NO: 64790 - DNA, 20 bp, Homo Sapiens
atgtctaacaacatggcttt

SEQ ID NO: 64791 - DNA, 21 bp, Homo Sapiens
atgtctaacaacatggctttc

SEQ ID NO: 64792 - DNA, 22 bp, Homo Sapiens
atgtctaacaacatggctttct

SEQ ID NO: 64793 - DNA, 23 bp, Homo Sapiens
atgtctaacaacatggctttctc

SEQ ID NO: 64794 - DNA, 24 bp, Homo Sapiens
atgtctaacaacatggctttctca

SEQ ID NO: 64795 - DNA, 16 bp, Homo Sapiens
atgtttagacgggctc

SEQ ID NO: 64796 - DNA, 17 bp, Homo Sapiens
atgtttagacgggctca

SEQ ID NO: 64797 - DNA, 18 bp, Homo Sapiens
atgtttagacgggctcac

SEQ ID NO: 64798 - DNA, 19 bp, Homo Sapiens
atgtttagacgggctcaca

SEQ ID NO: 64799 - DNA, 20 bp, Homo Sapiens
atgtttagacgggctcacat

SEQ ID NO: 64800 - DNA, 21 bp, Homo Sapiens
atgtttagacgggctcacatc

SEQ ID NO: 64801 - DNA, 22 bp, Homo Sapiens
atgtttagacgggctcacatca

SEQ ID NO: 64802 - DNA, 23 bp, Homo Sapiens
atgtttagacgggctcacatcac

SEQ ID NO: 64803 - DNA, 24 bp, Homo Sapiens
atgtttagacgggctcacatcacc

SEQ ID NO: 64804 - DNA, 25 bp, Homo Sapiens
atgtttagacgggctcacatcaccc

SEQ ID NO: 64805 - DNA, 19 bp, Homo Sapiens
attaaagtggctgatttgc

SEQ ID NO: 64806 - DNA, 23 bp, Homo Sapiens
attaaattatgataatcatattt

SEQ ID NO: 64807 - DNA, 19 bp, Homo Sapiens
attaactagttttgacaac

SEQ ID NO: 64808 - DNA, 20 bp, Homo Sapiens
attaactagttttgacaaca

SEQ ID NO: 64809 - DNA, 21 bp, Homo Sapiens
attaagagaaccaacacctct

SEQ ID NO: 64810 - DNA, 19 bp, Homo Sapiens
attagaatcttagctttgg

SEQ ID NO: 64811 - DNA, 18 bp, Homo Sapiens
attagctcaaatggtaga

SEQ ID NO: 64812 - DNA, 16 bp, Homo Sapiens
attataggctaaatcc

SEQ ID NO: 64813 - DNA, 17 bp, Homo Sapiens
attcaaaaaagagtacc

SEQ ID NO: 64814 - DNA, 18 bp, Homo Sapiens
attcaaaaaagagtacca

SEQ ID NO: 64815 - DNA, 17 bp, Homo Sapiens
attccccgacggggagc

SEQ ID NO: 64816 - DNA, 19 bp, Homo Sapiens
attccccgacggggagcca

SEQ ID NO: 64817 - DNA, 18 bp, Homo Sapiens
attcccggccaacgcacc

SEQ ID NO: 64818 - DNA, 19 bp, Homo Sapiens
attcccggccaacgcacca

SEQ ID NO: 64819 - DNA, 19 bp, Homo Sapiens
attcccggccaatgcacca

SEQ ID NO: 64820 - DNA, 18 bp, Homo Sapiens
attcccgggcggcgcacc

SEQ ID NO: 64821 - DNA, 19 bp, Homo Sapiens
attcccgggcggcgcacca

SEQ ID NO: 64822 - DNA, 19 bp, Homo Sapiens
attcccggtcagggaacca

SEQ ID NO: 64823 - DNA, 18 bp, Homo Sapiens
attccggctcgaaggacc

SEQ ID NO: 64824 - DNA, 19 bp, Homo Sapiens
attccggctcgaaggacca

SEQ ID NO: 64825 - DNA, 19 bp, Homo Sapiens
attccttccttttttgcca

SEQ ID NO: 64826 - DNA, 17 bp, Homo Sapiens
attctcagggatgggtt

SEQ ID NO: 64827 - DNA, 18 bp, Homo Sapiens
attctcatagtcctagcc

SEQ ID NO: 64828 - DNA, 17 bp, Homo Sapiens
attcttgcgacccgggt

SEQ ID NO: 64829 - DNA, 19 bp, Homo Sapiens
attcttgcgacccgggttc

SEQ ID NO: 64830 - DNA, 20 bp, Homo Sapiens
attcttgcgacccgggttcg

SEQ ID NO: 64831 - DNA, 18 bp, Homo Sapiens
attgagggttcgagtccc

SEQ ID NO: 64832 - DNA, 19 bp, Homo Sapiens
attgagggttcgagtccct

SEQ ID NO: 64833 - DNA, 16 bp, Homo Sapiens
attggtcgtggttgta

SEQ ID NO: 64834 - DNA, 17 bp, Homo Sapiens
attggtcgtggttgtag

SEQ ID NO: 64835 - DNA, 18 bp, Homo Sapiens
attggtcgtggttgtagt

SEQ ID NO: 64836 - DNA, 19 bp, Homo Sapiens
attggtcgtggttgtagtc

SEQ ID NO: 64837 - DNA, 20 bp, Homo Sapiens
attggtcgtggttgtagtcc

SEQ ID NO: 64838 - DNA, 21 bp, Homo Sapiens
attggtcgtggttgtagtccg

SEQ ID NO: 64839 - DNA, 23 bp, Homo Sapiens
attggtcgtggttgtagtccgtg

SEQ ID NO: 64840 - DNA, 24 bp, Homo Sapiens
attggtcgtggttgtagtccgtgc

SEQ ID NO: 64841 - DNA, 25 bp, Homo Sapiens
attggtcgtggttgtagtccgtgcg

SEQ ID NO: 64842 - DNA, 20 bp, Homo Sapiens
attggtggttcagtggtaga

SEQ ID NO: 64843 - DNA, 21 bp, Homo Sapiens
attggtggttcagtggtagaa

SEQ ID NO: 64844 - DNA, 24 bp, Homo Sapiens
attggtggttcagtggtagaattc

SEQ ID NO: 64845 - DNA, 25 bp, Homo Sapiens
attggtggttcagtggtagaattct

SEQ ID NO: 64846 - DNA, 16 bp, Homo Sapiens
attgtgaatctgacaa

SEQ ID NO: 64847 - DNA, 17 bp, Homo Sapiens
attgtgaatctgacaac

SEQ ID NO: 64848 - DNA, 18 bp, Homo Sapiens
attgtgaatctgacaaca

SEQ ID NO: 64849 - DNA, 19 bp, Homo Sapiens
attgtgaatctgacaacag

SEQ ID NO: 64850 - DNA, 20 bp, Homo Sapiens
attgtgaatctgacaacaga

SEQ ID NO: 64851 - DNA, 21 bp, Homo Sapiens
attgtgaatctgacaacagag

SEQ ID NO: 64852 - DNA, 23 bp, Homo Sapiens
attgtgaatctgacaacagaggc

SEQ ID NO: 64853 - DNA, 19 bp, Homo Sapiens
atttcaacttaacttgacc

SEQ ID NO: 64854 - DNA, 21 bp, Homo Sapiens
atttcaacttaacttgaccgc

SEQ ID NO: 64855 - DNA, 22 bp, Homo Sapiens
atttcaacttaacttgaccgct

SEQ ID NO: 64856 - DNA, 23 bp, Homo Sapiens
atttcaacttaacttgaccgctc

SEQ ID NO: 64857 - DNA, 17 bp, Homo Sapiens
atttcgatggcgtgggt

SEQ ID NO: 64858 - DNA, 17 bp, Homo Sapiens
attttggtgcaactcca

SEQ ID NO: 64859 - DNA, 21 bp, Homo Sapiens
attttggtgcaactccaaata

SEQ ID NO: 64860 - DNA, 19 bp, Homo Sapiens
caaaaattttggtgcaact

SEQ ID NO: 64861 - DNA, 20 bp, Homo Sapiens
caaaaattttggtgcaactc

SEQ ID NO: 64862 - DNA, 21 bp, Homo Sapiens
caaaaattttggtgcaactcc

SEQ ID NO: 64863 - DNA, 25 bp, Homo Sapiens
caaaaattttggtgcaactccaaat

SEQ ID NO: 64864 - DNA, 16 bp, Homo Sapiens
caaaacatcagattgt

SEQ ID NO: 64865 - DNA, 17 bp, Homo Sapiens
caaaacatcagattgtg

SEQ ID NO: 64866 - DNA, 18 bp, Homo Sapiens
caaaacatcagattgtga

SEQ ID NO: 64867 - DNA, 19 bp, Homo Sapiens
caaaacatcagattgtgaa

SEQ ID NO: 64868 - DNA, 20 bp, Homo Sapiens
caaaacatcagattgtgaat

SEQ ID NO: 64869 - DNA, 21 bp, Homo Sapiens
caaaacatcagattgtgaatc

SEQ ID NO: 64870 - DNA, 24 bp, Homo Sapiens
caaaacatcagattgtgaatctga

SEQ ID NO: 64871 - DNA, 25 bp, Homo Sapiens
caaaacatcagattgtgaatctgac

SEQ ID NO: 64872 - DNA, 17 bp, Homo Sapiens
caaaacgaatgatttcg

SEQ ID NO: 64873 - DNA, 19 bp, Homo Sapiens
caaaacgaatgatttcgac

SEQ ID NO: 64874 - DNA, 20 bp, Homo Sapiens
caaaacgaatgatttcgact

SEQ ID NO: 64875 - DNA, 21 bp, Homo Sapiens
caaaacgaatgatttcgactc

SEQ ID NO: 64876 - DNA, 22 bp, Homo Sapiens
caaaacgaatgatttcgactca

SEQ ID NO: 64877 - DNA, 23 bp, Homo Sapiens
caaaacgaatgatttcgactcat

SEQ ID NO: 64878 - DNA, 17 bp, Homo Sapiens
caaacctgccggggctt

SEQ ID NO: 64879 - DNA, 18 bp, Homo Sapiens
caaacctgccggggcttc

SEQ ID NO: 64880 - DNA, 19 bp, Homo Sapiens
caaacctgccggggcttcc

SEQ ID NO: 64881 - DNA, 20 bp, Homo Sapiens
caaacctgccggggcttcca

SEQ ID NO: 64882 - DNA, 16 bp, Homo Sapiens
caaagcaatacactga

SEQ ID NO: 64883 - DNA, 17 bp, Homo Sapiens
caaagcaatacactgaa

SEQ ID NO: 64884 - DNA, 19 bp, Homo Sapiens
caaagcaatacactgaaaa

SEQ ID NO: 64885 - DNA, 17 bp, Homo Sapiens
caaagcacccaacttac

SEQ ID NO: 64886 - DNA, 18 bp, Homo Sapiens
caaagcacccaacttaca

SEQ ID NO: 64887 - DNA, 19 bp, Homo Sapiens
caaagcacccaacttacac

SEQ ID NO: 64888 - DNA, 21 bp, Homo Sapiens
caaagcacccaacttacactt

SEQ ID NO: 64889 - DNA, 17 bp, Homo Sapiens
caaagttaaattatagg

SEQ ID NO: 64890 - DNA, 21 bp, Homo Sapiens
caaagttaaattataggctaa

SEQ ID NO: 64891 - DNA, 19 bp, Homo Sapiens
caaatcccggacgagcccc

SEQ ID NO: 64892 - DNA, 20 bp, Homo Sapiens
caaatcccggacgagccccc

SEQ ID NO: 64893 - DNA, 20 bp, Homo Sapiens
caaatctcggtggaacctcc

SEQ ID NO: 64894 - DNA, 21 bp, Homo Sapiens
caaatctcggtggaacctcca

SEQ ID NO: 64895 - DNA, 19 bp, Homo Sapiens
caacacctctttacagtga

SEQ ID NO: 64896 - DNA, 20 bp, Homo Sapiens
caacacctctttacagtgac

SEQ ID NO: 64897 - DNA, 21 bp, Homo Sapiens
caacacctctttacagtgacc

SEQ ID NO: 64898 - DNA, 22 bp, Homo Sapiens
caacacctctttacagtgacca

SEQ ID NO: 64899 - DNA, 18 bp, Homo Sapiens
caacatggctttctcacc

SEQ ID NO: 64900 - DNA, 19 bp, Homo Sapiens
caacatggctttctcacca

SEQ ID NO: 64901 - DNA, 21 bp, Homo Sapiens
caacattcaaaaaagagtacc

SEQ ID NO: 64902 - DNA, 22 bp, Homo Sapiens
caacattcaaaaaagagtacca

SEQ ID NO: 64903 - DNA, 20 bp, Homo Sapiens
caacgatggtttttcatatc

SEQ ID NO: 64904 - DNA, 21 bp, Homo Sapiens
caacgatggtttttcatatca

SEQ ID NO: 64905 - DNA, 19 bp, Homo Sapiens
caactccaaataaaagtac

SEQ ID NO: 64906 - DNA, 20 bp, Homo Sapiens
caactccaaataaaagtacc

SEQ ID NO: 64907 - DNA, 21 bp, Homo Sapiens
caactccaaataaaagtacca

SEQ ID NO: 64908 - DNA, 17 bp, Homo Sapiens
caacttaacttgaccgc

SEQ ID NO: 64909 - DNA, 18 bp, Homo Sapiens
caacttaacttgaccgct

SEQ ID NO: 64910 - DNA, 19 bp, Homo Sapiens
caacttaacttgaccgctc

SEQ ID NO: 64911 - DNA, 20 bp, Homo Sapiens
caacttaacttgaccgctct

SEQ ID NO: 64912 - DNA, 21 bp, Homo Sapiens
caacttaacttgaccgctctg

SEQ ID NO: 64913 - DNA, 22 bp, Homo Sapiens
caacttaacttgaccgctctga

SEQ ID NO: 64914 - DNA, 23 bp, Homo Sapiens
caacttaacttgaccgctctgac

SEQ ID NO: 64915 - DNA, 24 bp, Homo Sapiens
caacttaacttgaccgctctgacc

SEQ ID NO: 64916 - DNA, 25 bp, Homo Sapiens
caacttaacttgaccgctctgacca

SEQ ID NO: 64917 - DNA, 16 bp, Homo Sapiens
caacttacacttagga

SEQ ID NO: 64918 - DNA, 17 bp, Homo Sapiens
caacttacacttaggag

SEQ ID NO: 64919 - DNA, 18 bp, Homo Sapiens
caacttacacttaggaga

SEQ ID NO: 64920 - DNA, 19 bp, Homo Sapiens
caacttacacttaggagat

SEQ ID NO: 64921 - DNA, 20 bp, Homo Sapiens
caacttacacttaggagatt

SEQ ID NO: 64922 - DNA, 21 bp, Homo Sapiens
caacttacacttaggagattt

SEQ ID NO: 64923 - DNA, 23 bp, Homo Sapiens
caacttacacttaggagatttca

SEQ ID NO: 64924 - DNA, 16 bp, Homo Sapiens
caagaactgctaactc

SEQ ID NO: 64925 - DNA, 17 bp, Homo Sapiens
caagaactgctaactca

SEQ ID NO: 64926 - DNA, 18 bp, Homo Sapiens
caagaactgctaactcat

SEQ ID NO: 64927 - DNA, 19 bp, Homo Sapiens
caagaactgctaactcatg

SEQ ID NO: 64928 - DNA, 20 bp, Homo Sapiens
caagaactgctaactcatgc

SEQ ID NO: 64929 - DNA, 21 bp, Homo Sapiens
caagaactgctaactcatgcc

SEQ ID NO: 64930 - DNA, 17 bp, Homo Sapiens
caagaggtccccggttc

SEQ ID NO: 64931 - DNA, 18 bp, Homo Sapiens
caagcagttgacccgggt

SEQ ID NO: 64932 - DNA, 19 bp, Homo Sapiens
caagcagttgacccgggtt

SEQ ID NO: 64933 - DNA, 20 bp, Homo Sapiens
caagcagttgacccgggttc

SEQ ID NO: 64934 - DNA, 20 bp, Homo Sapiens
caagtccctgttcgggcgcc

SEQ ID NO: 64935 - DNA, 18 bp, Homo Sapiens
caagttctggtctccaat

SEQ ID NO: 64936 - DNA, 19 bp, Homo Sapiens
caagttctggtctccaatg

SEQ ID NO: 64937 - DNA, 17 bp, Homo Sapiens
caagttctggtctccgg

SEQ ID NO: 64938 - DNA, 18 bp, Homo Sapiens
caagttctggtctccgga

SEQ ID NO: 64939 - DNA, 19 bp, Homo Sapiens
caagttctggtctccggat

SEQ ID NO: 64940 - DNA, 18 bp, Homo Sapiens
caatacttaatttctgcc

SEQ ID NO: 64941 - DNA, 19 bp, Homo Sapiens
caatacttaatttctgcca

SEQ ID NO: 64942 - DNA, 18 bp, Homo Sapiens
caatggatagcgcattgg

SEQ ID NO: 64943 - DNA, 21 bp, Homo Sapiens
caattaactagttttgacaac

SEQ ID NO: 64944 - DNA, 22 bp, Homo Sapiens
caattaactagttttgacaaca

SEQ ID NO: 64945 - DNA, 20 bp, Homo Sapiens
caattcctcttcttaacacc

SEQ ID NO: 64946 - DNA, 16 bp, Homo Sapiens
cacaaagcacccaact

SEQ ID NO: 64947 - DNA, 19 bp, Homo Sapiens
cacaaagcacccaacttac

SEQ ID NO: 64948 - DNA, 16 bp, Homo Sapiens
cacaagaactgctaac

SEQ ID NO: 64949 - DNA, 17 bp, Homo Sapiens
cacaagaactgctaact

SEQ ID NO: 64950 - DNA, 18 bp, Homo Sapiens
cacaagaactgctaactc

SEQ ID NO: 64951 - DNA, 19 bp, Homo Sapiens
cacaagaactgctaactca

SEQ ID NO: 64952 - DNA, 20 bp, Homo Sapiens
cacaagaactgctaactcat

SEQ ID NO: 64953 - DNA, 21 bp, Homo Sapiens
cacaagaactgctaactcatg

SEQ ID NO: 64954 - DNA, 22 bp, Homo Sapiens
cacaagaactgctaactcatgc

SEQ ID NO: 64955 - DNA, 17 bp, Homo Sapiens
cacatcaccccataaac

SEQ ID NO: 64956 - DNA, 18 bp, Homo Sapiens
cacatcaccccataaaca

SEQ ID NO: 64957 - DNA, 20 bp, Homo Sapiens
cacatcaccccataaacacc

SEQ ID NO: 64958 - DNA, 21 bp, Homo Sapiens
cacatcaccccataaacacca

SEQ ID NO: 64959 - DNA, 24 bp, Homo Sapiens
cacatggtctagcggttaggattc

SEQ ID NO: 64960 - DNA, 25 bp, Homo Sapiens
cacatggtctagcggttaggattcc

SEQ ID NO: 64961 - DNA, 17 bp, Homo Sapiens
cacccaacttacactta

SEQ ID NO: 64962 - DNA, 19 bp, Homo Sapiens
cacccaacttacacttagg

SEQ ID NO: 64963 - DNA, 22 bp, Homo Sapiens
cacccaacttacacttaggaga

SEQ ID NO: 64964 - DNA, 19 bp, Homo Sapiens
cacccaggcggcccgggtt

SEQ ID NO: 64965 - DNA, 20 bp, Homo Sapiens
cacccaggcggcccgggttc

SEQ ID NO: 64966 - DNA, 16 bp, Homo Sapiens
caccccataaacacca

SEQ ID NO: 64967 - DNA, 19 bp, Homo Sapiens
caccgccgcggcccgggtt

SEQ ID NO: 64968 - DNA, 20 bp, Homo Sapiens
caccgccgcggcccgggttc

SEQ ID NO: 64969 - DNA, 16 bp, Homo Sapiens
cacctctttacagtga

SEQ ID NO: 64970 - DNA, 17 bp, Homo Sapiens
cacctctttacagtgac

SEQ ID NO: 64971 - DNA, 18 bp, Homo Sapiens
cacctctttacagtgacc

SEQ ID NO: 64972 - DNA, 19 bp, Homo Sapiens
cacctctttacagtgacca

SEQ ID NO: 64973 - DNA, 17 bp, Homo Sapiens
cacgcgggagaccgggg

SEQ ID NO: 64974 - DNA, 18 bp, Homo Sapiens
cacgcgggagaccggggt

SEQ ID NO: 64975 - DNA, 16 bp, Homo Sapiens
cacgtcggggtcacca

SEQ ID NO: 64976 - DNA, 18 bp, Homo Sapiens
cactctggactctgaatc

SEQ ID NO: 64977 - DNA, 19 bp, Homo Sapiens
cactctggactctgaatcc

SEQ ID NO: 64978 - DNA, 20 bp, Homo Sapiens
cactctggactctgaatcca

SEQ ID NO: 64979 - DNA, 16 bp, Homo Sapiens
cactgtaaagctaact

SEQ ID NO: 64980 - DNA, 17 bp, Homo Sapiens
cactgtaaagctaactt

SEQ ID NO: 64981 - DNA, 18 bp, Homo Sapiens
cactgtaaagctaactta

SEQ ID NO: 64982 - DNA, 19 bp, Homo Sapiens
cactgtaaagctaacttag

SEQ ID NO: 64983 - DNA, 20 bp, Homo Sapiens
cactgtaaagctaacttagc

SEQ ID NO: 64984 - DNA, 21 bp, Homo Sapiens
cactgtaaagctaacttagca

SEQ ID NO: 64985 - DNA, 22 bp, Homo Sapiens
cactgtaaagctaacttagcat

SEQ ID NO: 64986 - DNA, 23 bp, Homo Sapiens
cactgtaaagctaacttagcatt

SEQ ID NO: 64987 - DNA, 24 bp, Homo Sapiens
cactgtaaagctaacttagcatta

SEQ ID NO: 64988 - DNA, 25 bp, Homo Sapiens
cactgtaaagctaacttagcattaa

SEQ ID NO: 64989 - DNA, 16 bp, Homo Sapiens
cacttaggagatttca

SEQ ID NO: 64990 - DNA, 18 bp, Homo Sapiens
cacttaggagatttcaac

SEQ ID NO: 64991 - DNA, 19 bp, Homo Sapiens
cacttaggagatttcaact

SEQ ID NO: 64992 - DNA, 20 bp, Homo Sapiens
cacttaggagatttcaactt

SEQ ID NO: 64993 - DNA, 21 bp, Homo Sapiens
cacttaggagatttcaactta

SEQ ID NO: 64994 - DNA, 24 bp, Homo Sapiens
cacttaggagatttcaacttaact

SEQ ID NO: 64995 - DNA, 18 bp, Homo Sapiens
cagaagattccaggttcg

SEQ ID NO: 64996 - DNA, 18 bp, Homo Sapiens
cagaagattgagggttcg

SEQ ID NO: 64997 - DNA, 18 bp, Homo Sapiens
cagaagattgcaggttcg

SEQ ID NO: 64998 - DNA, 16 bp, Homo Sapiens
cagaccaagagccttc

SEQ ID NO: 64999 - DNA, 17 bp, Homo Sapiens
cagaccaagagccttca

SEQ ID NO: 65000 - DNA, 16 bp, Homo Sapiens
cagagaatagtttaaa

SEQ ID NO: 65001 - DNA, 17 bp, Homo Sapiens
cagagaatagtttaaat

SEQ ID NO: 65002 - DNA, 18 bp, Homo Sapiens
cagagaatagtttaaatt

SEQ ID NO: 65003 - DNA, 19 bp, Homo Sapiens
cagagaatagtttaaatta

SEQ ID NO: 65004 - DNA, 20 bp, Homo Sapiens
cagagaatagtttaaattag

SEQ ID NO: 65005 - DNA, 21 bp, Homo Sapiens
cagagaatagtttaaattaga

SEQ ID NO: 65006 - DNA, 22 bp, Homo Sapiens
cagagaatagtttaaattagaa

SEQ ID NO: 65007 - DNA, 23 bp, Homo Sapiens
cagagaatagtttaaattagaat

SEQ ID NO: 65008 - DNA, 24 bp, Homo Sapiens
cagagaatagtttaaattagaatc

SEQ ID NO: 65009 - DNA, 25 bp, Homo Sapiens
cagagaatagtttaaattagaatct

SEQ ID NO: 65010 - DNA, 16 bp, Homo Sapiens
cagaggtcgatggatc

SEQ ID NO: 65011 - DNA, 17 bp, Homo Sapiens
cagaggtcgatggatcg

SEQ ID NO: 65012 - DNA, 16 bp, Homo Sapiens
cagaggttccgggttc

SEQ ID NO: 65013 - DNA, 25 bp, Homo Sapiens
cagagtggcgcagcggaagcgtgct

SEQ ID NO: 65014 - DNA, 16 bp, Homo Sapiens
cagagtgtagcttaac

SEQ ID NO: 65015 - DNA, 17 bp, Homo Sapiens
cagagtgtagcttaaca

SEQ ID NO: 65016 - DNA, 18 bp, Homo Sapiens
cagagtgtagcttaacac

SEQ ID NO: 65017 - DNA, 19 bp, Homo Sapiens
cagagtgtagcttaacaca

SEQ ID NO: 65018 - DNA, 20 bp, Homo Sapiens
cagagtgtagcttaacacaa

SEQ ID NO: 65019 - DNA, 21 bp, Homo Sapiens
cagagtgtagcttaacacaaa

SEQ ID NO: 65020 - DNA, 22 bp, Homo Sapiens
cagagtgtagcttaacacaaag

SEQ ID NO: 65021 - DNA, 23 bp, Homo Sapiens
cagagtgtagcttaacacaaagc

SEQ ID NO: 65022 - DNA, 24 bp, Homo Sapiens
cagagtgtagcttaacacaaagca

SEQ ID NO: 65023 - DNA, 25 bp, Homo Sapiens
cagagtgtagcttaacacaaagcac

SEQ ID NO: 65024 - DNA, 17 bp, Homo Sapiens
cagattgtgaatctgac

SEQ ID NO: 65025 - DNA, 18 bp, Homo Sapiens
cagattgtgaatctgaca

SEQ ID NO: 65026 - DNA, 19 bp, Homo Sapiens
cagattgtgaatctgacaa

SEQ ID NO: 65027 - DNA, 20 bp, Homo Sapiens
cagattgtgaatctgacaac

SEQ ID NO: 65028 - DNA, 21 bp, Homo Sapiens
cagattgtgaatctgacaaca

SEQ ID NO: 65029 - DNA, 22 bp, Homo Sapiens
cagattgtgaatctgacaacag

SEQ ID NO: 65030 - DNA, 23 bp, Homo Sapiens
cagattgtgaatctgacaacaga

SEQ ID NO: 65031 - DNA, 24 bp, Homo Sapiens
cagattgtgaatctgacaacagag

SEQ ID NO: 65032 - DNA, 16 bp, Homo Sapiens
cagcgatccgagttca

SEQ ID NO: 65033 - DNA, 19 bp, Homo Sapiens
cagctaaataagctatcgg

SEQ ID NO: 65034 - DNA, 16 bp, Homo Sapiens
cagctatccattggtc

SEQ ID NO: 65035 - DNA, 17 bp, Homo Sapiens
cagctatccattggtct

SEQ ID NO: 65036 - DNA, 16 bp, Homo Sapiens
caggagatcctgggtt

SEQ ID NO: 65037 - DNA, 17 bp, Homo Sapiens
caggagatcctgggttc

SEQ ID NO: 65038 - DNA, 18 bp, Homo Sapiens
caggagatcctgggttcg

SEQ ID NO: 65039 - DNA, 16 bp, Homo Sapiens
cagggattgtgggttc

SEQ ID NO: 65040 - DNA, 16 bp, Homo Sapiens
caggggtcgcgagttc

SEQ ID NO: 65041 - DNA, 16 bp, Homo Sapiens
cagggtcgtgggttcg

SEQ ID NO: 65042 - DNA, 16 bp, Homo Sapiens
caggtcgcagtctccc

SEQ ID NO: 65043 - DNA, 16 bp, Homo Sapiens
cagtaagttgcaatac

SEQ ID NO: 65044 - DNA, 17 bp, Homo Sapiens
cagtaagttgcaatact

SEQ ID NO: 65045 - DNA, 24 bp, Homo Sapiens
cagtaagttgcaatacttaatttc

SEQ ID NO: 65046 - DNA, 19 bp, Homo Sapiens
cagtcagaggttcaattcc

SEQ ID NO: 65047 - DNA, 21 bp, Homo Sapiens
cagtcagaggttcaattcctc

SEQ ID NO: 65048 - DNA, 22 bp, Homo Sapiens
cagtcagaggttcaattcctct

SEQ ID NO: 65049 - DNA, 16 bp, Homo Sapiens
cagtcggtagagcatc

SEQ ID NO: 65050 - DNA, 17 bp, Homo Sapiens
cagtcggtagagcatca

SEQ ID NO: 65051 - DNA, 18 bp, Homo Sapiens
cagtcggtagagcatcag

SEQ ID NO: 65052 - DNA, 19 bp, Homo Sapiens
cagtcggtagagcatcaga

SEQ ID NO: 65053 - DNA, 20 bp, Homo Sapiens
cagtcggtagagcatcagac

SEQ ID NO: 65054 - DNA, 21 bp, Homo Sapiens
cagtcggtagagcatcagact

SEQ ID NO: 65055 - DNA, 24 bp, Homo Sapiens
cagtcggtagagcatcagactttt

SEQ ID NO: 65056 - DNA, 16 bp, Homo Sapiens
cagtcggtagagcatg

SEQ ID NO: 65057 - DNA, 17 bp, Homo Sapiens
cagtcggtagagcatga

SEQ ID NO: 65058 - DNA, 18 bp, Homo Sapiens
cagtcggtagagcatgag

SEQ ID NO: 65059 - DNA, 19 bp, Homo Sapiens
cagtcggtagagcatgaga

SEQ ID NO: 65060 - DNA, 20 bp, Homo Sapiens
cagtcggtagagcatgagac

SEQ ID NO: 65061 - DNA, 21 bp, Homo Sapiens
cagtcggtagagcatgagact

SEQ ID NO: 65062 - DNA, 22 bp, Homo Sapiens
cagtcggtagagcatgagactc

SEQ ID NO: 65063 - DNA, 23 bp, Homo Sapiens
cagtcggtagagcatgagactct

SEQ ID NO: 65064 - DNA, 24 bp, Homo Sapiens
cagtcggtagagcatgagactctt

SEQ ID NO: 65065 - DNA, 17 bp, Homo Sapiens
cagtcggtagagcatgg

SEQ ID NO: 65066 - DNA, 18 bp, Homo Sapiens
cagtcggtagagcatggg

SEQ ID NO: 65067 - DNA, 19 bp, Homo Sapiens
cagtcggtagagcatggga

SEQ ID NO: 65068 - DNA, 20 bp, Homo Sapiens
cagtcggtagagcatgggac

SEQ ID NO: 65069 - DNA, 21 bp, Homo Sapiens
cagtcggtagagcatgggact

SEQ ID NO: 65070 - DNA, 22 bp, Homo Sapiens
cagtcggtagagcatgggactc

SEQ ID NO: 65071 - DNA, 23 bp, Homo Sapiens
cagtcggtagagcatgggactct

SEQ ID NO: 65072 - DNA, 24 bp, Homo Sapiens
cagtcggtagagcatgggactctt

SEQ ID NO: 65073 - DNA, 16 bp, Homo Sapiens
cagtctcttcgggggc

SEQ ID NO: 65074 - DNA, 23 bp, Homo Sapiens
cagtctcttcgggggcgtgggtt

SEQ ID NO: 65075 - DNA, 24 bp, Homo Sapiens
cagtctcttcgggggcgtgggttc

SEQ ID NO: 65076 - DNA, 18 bp, Homo Sapiens
cagtggtagaattctcgc

SEQ ID NO: 65077 - DNA, 19 bp, Homo Sapiens
cagtggtagaattctcgcc

SEQ ID NO: 65078 - DNA, 20 bp, Homo Sapiens
cagtggtagaattctcgcct

SEQ ID NO: 65079 - DNA, 22 bp, Homo Sapiens
cagtggtagaattctcgcctgc

SEQ ID NO: 65080 - DNA, 23 bp, Homo Sapiens
cagtggtagaattctcgcctgcc

SEQ ID NO: 65081 - DNA, 16 bp, Homo Sapiens
cagtggtagagcattt

SEQ ID NO: 65082 - DNA, 18 bp, Homo Sapiens
cagtggtagagcatttga

SEQ ID NO: 65083 - DNA, 16 bp, Homo Sapiens
cagttgacccgggttc

SEQ ID NO: 65084 - DNA, 17 bp, Homo Sapiens
cagttgacccgggttcg

SEQ ID NO: 65085 - DNA, 16 bp, Homo Sapiens
cagttggtagagcatc

SEQ ID NO: 65086 - DNA, 18 bp, Homo Sapiens
cataaaacttaaaacttt

SEQ ID NO: 65087 - DNA, 19 bp, Homo Sapiens
cataaaacttaaaacttta

SEQ ID NO: 65088 - DNA, 21 bp, Homo Sapiens
cataaaacttaaaactttaca

SEQ ID NO: 65089 - DNA, 24 bp, Homo Sapiens
cataaaacttaaaactttacagtc

SEQ ID NO: 65090 - DNA, 25 bp, Homo Sapiens
cataaaacttaaaactttacagtca

SEQ ID NO: 65091 - DNA, 19 bp, Homo Sapiens
cataatctgaaggtcgtga

SEQ ID NO: 65092 - DNA, 20 bp, Homo Sapiens
catatcattggtcgtggttg

SEQ ID NO: 65093 - DNA, 24 bp, Homo Sapiens
catatggtctagcggttaggattc

SEQ ID NO: 65094 - DNA, 25 bp, Homo Sapiens
catatggtctagcggttaggattcc

SEQ ID NO: 65095 - DNA, 17 bp, Homo Sapiens
catatgtccgcgtgggt

SEQ ID NO: 65096 - DNA, 18 bp, Homo Sapiens
catatgtccgcgtgggtt

SEQ ID NO: 65097 - DNA, 20 bp, Homo Sapiens
catattgaattgcaaattcg

SEQ ID NO: 65098 - DNA, 21 bp, Homo Sapiens
catattgaattgcaaattcga

SEQ ID NO: 65099 - DNA, 16 bp, Homo Sapiens
catcaccccataaaca

SEQ ID NO: 65100 - DNA, 18 bp, Homo Sapiens
catcaccccataaacacc

SEQ ID NO: 65101 - DNA, 19 bp, Homo Sapiens
catcaccccataaacacca

SEQ ID NO: 65102 - DNA, 16 bp, Homo Sapiens
catcagattgtgaatc

SEQ ID NO: 65103 - DNA, 17 bp, Homo Sapiens
catcagattgtgaatct

SEQ ID NO: 65104 - DNA, 19 bp, Homo Sapiens
catcagattgtgaatctga

SEQ ID NO: 65105 - DNA, 21 bp, Homo Sapiens
catcagattgtgaatctgaca

SEQ ID NO: 65106 - DNA, 24 bp, Homo Sapiens
catcagattgtgaatctgacaaca

SEQ ID NO: 65107 - DNA, 16 bp, Homo Sapiens
catgagactcttaatc

SEQ ID NO: 65108 - DNA, 17 bp, Homo Sapiens
catgagactcttaatct

SEQ ID NO: 65109 - DNA, 18 bp, Homo Sapiens
catgagactcttaatctc

SEQ ID NO: 65110 - DNA, 19 bp, Homo Sapiens
catgcccccatgtctaaca

SEQ ID NO: 65111 - DNA, 16 bp, Homo Sapiens
catggctttctcacca

SEQ ID NO: 65112 - DNA, 17 bp, Homo Sapiens
catgggactcttaatcc

SEQ ID NO: 65113 - DNA, 18 bp, Homo Sapiens
catgtctaacaacatggc

SEQ ID NO: 65114 - DNA, 19 bp, Homo Sapiens
catgtctaacaacatggct

SEQ ID NO: 65115 - DNA, 20 bp, Homo Sapiens
catgtctaacaacatggctt

SEQ ID NO: 65116 - DNA, 24 bp, Homo Sapiens
cattaaattatgataatcatattt

SEQ ID NO: 65117 - DNA, 16 bp, Homo Sapiens
cattaaccttttaagt

SEQ ID NO: 65118 - DNA, 17 bp, Homo Sapiens
cattaaccttttaagtt

SEQ ID NO: 65119 - DNA, 18 bp, Homo Sapiens
cattaaccttttaagtta

SEQ ID NO: 65120 - DNA, 17 bp, Homo Sapiens
cattcaaaaaagagtac

SEQ ID NO: 65121 - DNA, 18 bp, Homo Sapiens
cattcaaaaaagagtacc

SEQ ID NO: 65122 - DNA, 19 bp, Homo Sapiens
cattcaaaaaagagtacca

SEQ ID NO: 65123 - DNA, 18 bp, Homo Sapiens
cattcttgcgacccgggt

SEQ ID NO: 65124 - DNA, 19 bp, Homo Sapiens
cattcttgcgacccgggtt

SEQ ID NO: 65125 - DNA, 20 bp, Homo Sapiens
cattcttgcgacccgggttc

SEQ ID NO: 65126 - DNA, 21 bp, Homo Sapiens
cattcttgcgacccgggttcg

SEQ ID NO: 65127 - DNA, 22 bp, Homo Sapiens
cattcttgcgacccgggttcga

SEQ ID NO: 65128 - DNA, 23 bp, Homo Sapiens
cattcttgcgacccgggttcgat

SEQ ID NO: 65129 - DNA, 19 bp, Homo Sapiens
cattggggtttccccgcgc

SEQ ID NO: 65130 - DNA, 16 bp, Homo Sapiens
cattggtcgtggttgt

SEQ ID NO: 65131 - DNA, 17 bp, Homo Sapiens
cattggtcgtggttgta

SEQ ID NO: 65132 - DNA, 19 bp, Homo Sapiens
cattggtcgtggttgtagt

SEQ ID NO: 65133 - DNA, 20 bp, Homo Sapiens
cattggtcgtggttgtagtc

SEQ ID NO: 65134 - DNA, 21 bp, Homo Sapiens
cattggtcgtggttgtagtcc

SEQ ID NO: 65135 - DNA, 17 bp, Homo Sapiens
cattggtcttaggcccc

SEQ ID NO: 65136 - DNA, 18 bp, Homo Sapiens
cattggtcttaggcccca

SEQ ID NO: 65137 - DNA, 17 bp, Homo Sapiens
catttcataactttgtc

SEQ ID NO: 65138 - DNA, 21 bp, Homo Sapiens
ccaaaaattttggtgcaactc

SEQ ID NO: 65139 - DNA, 17 bp, Homo Sapiens
ccaaaacatcagattgt

SEQ ID NO: 65140 - DNA, 18 bp, Homo Sapiens
ccaaaacatcagattgtg

SEQ ID NO: 65141 - DNA, 19 bp, Homo Sapiens
ccaaaacatcagattgtga

SEQ ID NO: 65142 - DNA, 20 bp, Homo Sapiens
ccaaaacatcagattgtgaa

SEQ ID NO: 65143 - DNA, 21 bp, Homo Sapiens
ccaaaacatcagattgtgaat

SEQ ID NO: 65144 - DNA, 22 bp, Homo Sapiens
ccaaaacatcagattgtgaatc

SEQ ID NO: 65145 - DNA, 16 bp, Homo Sapiens
ccaaataaaagtacca

SEQ ID NO: 65146 - DNA, 20 bp, Homo Sapiens
ccaacacctctttacagtga

SEQ ID NO: 65147 - DNA, 21 bp, Homo Sapiens
ccaacacctctttacagtgac

SEQ ID NO: 65148 - DNA, 22 bp, Homo Sapiens
ccaacacctctttacagtgacc

SEQ ID NO: 65149 - DNA, 17 bp, Homo Sapiens
ccaacttacacttagga

SEQ ID NO: 65150 - DNA, 18 bp, Homo Sapiens
ccaacttacacttaggag

SEQ ID NO: 65151 - DNA, 19 bp, Homo Sapiens
ccaacttacacttaggaga

SEQ ID NO: 65152 - DNA, 21 bp, Homo Sapiens
ccaacttacacttaggagatt

SEQ ID NO: 65153 - DNA, 24 bp, Homo Sapiens
ccaacttacacttaggagatttca

SEQ ID NO: 65154 - DNA, 25 bp, Homo Sapiens
ccaacttacacttaggagatttcaa

SEQ ID NO: 65155 - DNA, 16 bp, Homo Sapiens
ccaaggtcgcgggttc

SEQ ID NO: 65156 - DNA, 16 bp, Homo Sapiens
ccacccagggacgcca

SEQ ID NO: 65157 - DNA, 17 bp, Homo Sapiens
ccactgtaaagctaact

SEQ ID NO: 65158 - DNA, 18 bp, Homo Sapiens
ccactgtaaagctaactt

SEQ ID NO: 65159 - DNA, 17 bp, Homo Sapiens
ccagaggtcgatggatc

SEQ ID NO: 65160 - DNA, 18 bp, Homo Sapiens
ccagaggtcgatggatcg

SEQ ID NO: 65161 - DNA, 17 bp, Homo Sapiens
ccagaggttccgggttc

SEQ ID NO: 65162 - DNA, 17 bp, Homo Sapiens
ccagagtgtagcttaac

SEQ ID NO: 65163 - DNA, 16 bp, Homo Sapiens
ccagcgatccgagttc

SEQ ID NO: 65164 - DNA, 17 bp, Homo Sapiens
ccagcgatccgagttca

SEQ ID NO: 65165 - DNA, 17 bp, Homo Sapiens
ccagggattgtgggttc

SEQ ID NO: 65166 - DNA, 18 bp, Homo Sapiens
ccagggattgtgggttcg

SEQ ID NO: 65167 - DNA, 17 bp, Homo Sapiens
ccaggggtcgcgagttc

SEQ ID NO: 65168 - DNA, 16 bp, Homo Sapiens
ccagggtcgtgggttc

SEQ ID NO: 65169 - DNA, 17 bp, Homo Sapiens
ccagggtcgtgggttcg

SEQ ID NO: 65170 - DNA, 17 bp, Homo Sapiens
ccagtctcttcgggggc

SEQ ID NO: 65171 - DNA, 16 bp, Homo Sapiens
ccagtggcgcaatgga

SEQ ID NO: 65172 - DNA, 18 bp, Homo Sapiens
ccataacccagaggtcga

SEQ ID NO: 65173 - DNA, 16 bp, Homo Sapiens
ccatcctctgctacca

SEQ ID NO: 65174 - DNA, 19 bp, Homo Sapiens
ccatggtgtaatggttagc

SEQ ID NO: 65175 - DNA, 20 bp, Homo Sapiens
ccatgtctaacaacatggct

SEQ ID NO: 65176 - DNA, 16 bp, Homo Sapiens
ccattggtcttaggcc

SEQ ID NO: 65177 - DNA, 18 bp, Homo Sapiens
ccattggtcttaggcccc

SEQ ID NO: 65178 - DNA, 19 bp, Homo Sapiens
ccattggtcttaggcccca

SEQ ID NO: 65179 - DNA, 19 bp, Homo Sapiens
cccaacttacacttaggag

SEQ ID NO: 65180 - DNA, 20 bp, Homo Sapiens
cccaacttacacttaggaga

SEQ ID NO: 65181 - DNA, 16 bp, Homo Sapiens
cccacccagggacgcc

SEQ ID NO: 65182 - DNA, 17 bp, Homo Sapiens
cccacccagggacgcca

SEQ ID NO: 65183 - DNA, 16 bp, Homo Sapiens
cccaccgctgccacca

SEQ ID NO: 65184 - DNA, 16 bp, Homo Sapiens
cccacgttgggcgcca

SEQ ID NO: 65185 - DNA, 16 bp, Homo Sapiens
cccactcctgacacca

SEQ ID NO: 65186 - DNA, 16 bp, Homo Sapiens
cccactcctggtacca

SEQ ID NO: 65187 - DNA, 16 bp, Homo Sapiens
cccacttctgacacca

SEQ ID NO: 65188 - DNA, 16 bp, Homo Sapiens
cccagaggtcgatgga

SEQ ID NO: 65189 - DNA, 18 bp, Homo Sapiens
cccagaggtcgatggatc

SEQ ID NO: 65190 - DNA, 19 bp, Homo Sapiens
cccagaggtcgatggatcg

SEQ ID NO: 65191 - DNA, 16 bp, Homo Sapiens
cccagcggggcctcca

SEQ ID NO: 65192 - DNA, 16 bp, Homo Sapiens
cccagcggtgcctcca

SEQ ID NO: 65193 - DNA, 16 bp, Homo Sapiens
cccagtggaaccacca

SEQ ID NO: 65194 - DNA, 17 bp, Homo Sapiens
cccagtggcctaatgga

SEQ ID NO: 65195 - DNA, 19 bp, Homo Sapiens
cccataacccagaggtcga

SEQ ID NO: 65196 - DNA, 17 bp, Homo Sapiens
cccataccccgaaaatg

SEQ ID NO: 65197 - DNA, 19 bp, Homo Sapiens
cccataccccgaaaatgtt

SEQ ID NO: 65198 - DNA, 20 bp, Homo Sapiens
cccataccccgaaaatgttg

SEQ ID NO: 65199 - DNA, 16 bp, Homo Sapiens
cccatcctcgtcgcca

SEQ ID NO: 65200 - DNA, 16 bp, Homo Sapiens
cccatgtctaacaaca

SEQ ID NO: 65201 - DNA, 20 bp, Homo Sapiens
cccatgtctaacaacatggc

SEQ ID NO: 65202 - DNA, 21 bp, Homo Sapiens
cccatgtctaacaacatggct

SEQ ID NO: 65203 - DNA, 20 bp, Homo Sapiens
cccattcttgcgacccgggt

SEQ ID NO: 65204 - DNA, 21 bp, Homo Sapiens
cccattcttgcgacccgggtt

SEQ ID NO: 65205 - DNA, 16 bp, Homo Sapiens
cccattggtctagcca

SEQ ID NO: 65206 - DNA, 16 bp, Homo Sapiens
ccccacgttgggcgcc

SEQ ID NO: 65207 - DNA, 17 bp, Homo Sapiens
ccccacgttgggcgcca

SEQ ID NO: 65208 - DNA, 16 bp, Homo Sapiens
ccccactcctggtacc

SEQ ID NO: 65209 - DNA, 17 bp, Homo Sapiens
ccccactcctggtacca

SEQ ID NO: 65210 - DNA, 17 bp, Homo Sapiens
ccccagcatctccacca

SEQ ID NO: 65211 - DNA, 17 bp, Homo Sapiens
ccccagtggaaccacca

SEQ ID NO: 65212 - DNA, 17 bp, Homo Sapiens
ccccatgtctaacaaca

SEQ ID NO: 65213 - DNA, 21 bp, Homo Sapiens
ccccatgtctaacaacatggc

SEQ ID NO: 65214 - DNA, 22 bp, Homo Sapiens
ccccatgtctaacaacatggct

SEQ ID NO: 65215 - DNA, 18 bp, Homo Sapiens
cccccatgtctaacaaca

SEQ ID NO: 65216 - DNA, 22 bp, Homo Sapiens
cccccatgtctaacaacatggc

SEQ ID NO: 65217 - DNA, 23 bp, Homo Sapiens
cccccatgtctaacaacatggct

SEQ ID NO: 65218 - DNA, 16 bp, Homo Sapiens
cccccttatttctacc

SEQ ID NO: 65219 - DNA, 17 bp, Homo Sapiens
cccccttatttctacca

SEQ ID NO: 65220 - DNA, 16 bp, Homo Sapiens
ccccgacggggagcca

SEQ ID NO: 65221 - DNA, 16 bp, Homo Sapiens
ccccggcacctccacc

SEQ ID NO: 65222 - DNA, 17 bp, Homo Sapiens
ccccggcacctccacca

SEQ ID NO: 65223 - DNA, 16 bp, Homo Sapiens
ccccggcatctccacc

SEQ ID NO: 65224 - DNA, 17 bp, Homo Sapiens
ccccggcatctccacca

SEQ ID NO: 65225 - DNA, 16 bp, Homo Sapiens
ccccgtacgggccacc

SEQ ID NO: 65226 - DNA, 17 bp, Homo Sapiens
ccccgtacgggccacca

SEQ ID NO: 65227 - DNA, 16 bp, Homo Sapiens
ccccttatttacccca

SEQ ID NO: 65228 - DNA, 16 bp, Homo Sapiens
ccccttatttctacca

SEQ ID NO: 65229 - DNA, 16 bp, Homo Sapiens
cccgaaaatgttggtt

SEQ ID NO: 65230 - DNA, 17 bp, Homo Sapiens
cccgaaaatgttggtta

SEQ ID NO: 65231 - DNA, 18 bp, Homo Sapiens
cccgaaaatgttggttat

SEQ ID NO: 65232 - DNA, 16 bp, Homo Sapiens
cccgcatcctccacca

SEQ ID NO: 65233 - DNA, 16 bp, Homo Sapiens
cccggacgagccccca

SEQ ID NO: 65234 - DNA, 18 bp, Homo Sapiens
cccggatagctcagtcgg

SEQ ID NO: 65235 - DNA, 16 bp, Homo Sapiens
cccggcacctccacca

SEQ ID NO: 65236 - DNA, 16 bp, Homo Sapiens
cccggcatctccacca

SEQ ID NO: 65237 - DNA, 16 bp, Homo Sapiens
cccggccaacgcacca

SEQ ID NO: 65238 - DNA, 16 bp, Homo Sapiens
cccggccaatgcacca

SEQ ID NO: 65239 - DNA, 16 bp, Homo Sapiens
cccggcccatgcacca

SEQ ID NO: 65240 - DNA, 16 bp, Homo Sapiens
cccggcggagtcgcca

SEQ ID NO: 65241 - DNA, 18 bp, Homo Sapiens
cccggctagctcagtcgg

SEQ ID NO: 65242 - DNA, 17 bp, Homo Sapiens
cccgggcggaaacacca

SEQ ID NO: 65243 - DNA, 16 bp, Homo Sapiens
cccgggcggcgcacca

SEQ ID NO: 65244 - DNA, 16 bp, Homo Sapiens
cccgggtttcggcacc

SEQ ID NO: 65245 - DNA, 17 bp, Homo Sapiens
cccgggtttcggcacca

SEQ ID NO: 65246 - DNA, 19 bp, Homo Sapiens
cccggtaatcgcataaaac

SEQ ID NO: 65247 - DNA, 16 bp, Homo Sapiens
cccggtatgggaacca

SEQ ID NO: 65248 - DNA, 16 bp, Homo Sapiens
cccggtcagggaacca

SEQ ID NO: 65249 - DNA, 16 bp, Homo Sapiens
cccggtgtgggaacca

SEQ ID NO: 65250 - DNA, 16 bp, Homo Sapiens
cccgtacgggccacca

SEQ ID NO: 65251 - DNA, 16 bp, Homo Sapiens
ccctcagtaagttgca

SEQ ID NO: 65252 - DNA, 20 bp, Homo Sapiens
ccctcagtaagttgcaatac

SEQ ID NO: 65253 - DNA, 17 bp, Homo Sapiens
ccctgctcgctgcgcca

SEQ ID NO: 65254 - DNA, 18 bp, Homo Sapiens
ccctggtggtctagtggc

SEQ ID NO: 65255 - DNA, 16 bp, Homo Sapiens
ccctgttcgggcgcca

SEQ ID NO: 65256 - DNA, 16 bp, Homo Sapiens
cccttcccgtactacc

SEQ ID NO: 65257 - DNA, 17 bp, Homo Sapiens
cccttcccgtactacca

SEQ ID NO: 65258 - DNA, 16 bp, Homo Sapiens
cccttcgtggtcgcca

SEQ ID NO: 65259 - DNA, 17 bp, Homo Sapiens
ccgaaaatgttggttat

SEQ ID NO: 65260 - DNA, 19 bp, Homo Sapiens
ccgaaaatgttggttatac

SEQ ID NO: 65261 - DNA, 20 bp, Homo Sapiens
ccgaaaatgttggttatacc

SEQ ID NO: 65262 - DNA, 21 bp, Homo Sapiens
ccgaaaatgttggttataccc

SEQ ID NO: 65263 - DNA, 18 bp, Homo Sapiens
ccgaaaggttggtggttc

SEQ ID NO: 65264 - DNA, 17 bp, Homo Sapiens
ccgaagatcgcgggttc

SEQ ID NO: 65265 - DNA, 19 bp, Homo Sapiens
ccgaggtgattttcatatt

SEQ ID NO: 65266 - DNA, 20 bp, Homo Sapiens
ccgaggtgattttcatattg

SEQ ID NO: 65267 - DNA, 16 bp, Homo Sapiens
ccgaggttgtgagttc

SEQ ID NO: 65268 - DNA, 16 bp, Homo Sapiens
ccgagtcacggcacca

SEQ ID NO: 65269 - DNA, 18 bp, Homo Sapiens
ccgcagcaacctcggttc

SEQ ID NO: 65270 - DNA, 22 bp, Homo Sapiens
ccgcgcaggttcgaatcctgcc

SEQ ID NO: 65271 - DNA, 16 bp, Homo Sapiens
ccgcggcccgggttcg

SEQ ID NO: 65272 - DNA, 17 bp, Homo Sapiens
ccgcgtggcctaatgga

SEQ ID NO: 65273 - DNA, 18 bp, Homo Sapiens
ccgctggtgtagtggtat

SEQ ID NO: 65274 - DNA, 19 bp, Homo Sapiens
ccgctggtgtagtggtatc

SEQ ID NO: 65275 - DNA, 20 bp, Homo Sapiens
ccgctggtgtagtggtatca

SEQ ID NO: 65276 - DNA, 21 bp, Homo Sapiens
ccgctggtgtagtggtatcat

SEQ ID NO: 65277 - DNA, 22 bp, Homo Sapiens
ccgctggtgtagtggtatcatg

SEQ ID NO: 65278 - DNA, 23 bp, Homo Sapiens
ccgctggtgtagtggtatcatgc

SEQ ID NO: 65279 - DNA, 24 bp, Homo Sapiens
ccgctggtgtagtggtatcatgca

SEQ ID NO: 65280 - DNA, 25 bp, Homo Sapiens
ccgctggtgtagtggtatcatgcaa

SEQ ID NO: 65281 - DNA, 16 bp, Homo Sapiens
ccggagatgaaaacct

SEQ ID NO: 65282 - DNA, 17 bp, Homo Sapiens
ccggagatgaaaacctt

SEQ ID NO: 65283 - DNA, 18 bp, Homo Sapiens
ccggagatgaaaaccttt

SEQ ID NO: 65284 - DNA, 19 bp, Homo Sapiens
ccggagatgaaaacctttt

SEQ ID NO: 65285 - DNA, 20 bp, Homo Sapiens
ccggagatgaaaaccttttt

SEQ ID NO: 65286 - DNA, 21 bp, Homo Sapiens
ccggagatgaaaacctttttc

SEQ ID NO: 65287 - DNA, 22 bp, Homo Sapiens
ccggagatgaaaacctttttcc

SEQ ID NO: 65288 - DNA, 25 bp, Homo Sapiens
ccggagatgaaaacctttttccaag

SEQ ID NO: 65289 - DNA, 16 bp, Homo Sapiens
ccggatagctcagtcg

SEQ ID NO: 65290 - DNA, 17 bp, Homo Sapiens
ccggatagctcagtcgg

SEQ ID NO: 65291 - DNA, 19 bp, Homo Sapiens
ccggatagctcagtcggta

SEQ ID NO: 65292 - DNA, 20 bp, Homo Sapiens
ccggatagctcagtcggtag

SEQ ID NO: 65293 - DNA, 21 bp, Homo Sapiens
ccggatagctcagtcggtaga

SEQ ID NO: 65294 - DNA, 22 bp, Homo Sapiens
ccggatagctcagtcggtagag

SEQ ID NO: 65295 - DNA, 23 bp, Homo Sapiens
ccggatagctcagtcggtagagc

SEQ ID NO: 65296 - DNA, 24 bp, Homo Sapiens
ccggatagctcagtcggtagagca

SEQ ID NO: 65297 - DNA, 25 bp, Homo Sapiens
ccggatagctcagtcggtagagcat

SEQ ID NO: 65298 - DNA, 17 bp, Homo Sapiens
ccggatcagaagattga

SEQ ID NO: 65299 - DNA, 18 bp, Homo Sapiens
ccggatggaggcgtgggt

SEQ ID NO: 65300 - DNA, 19 bp, Homo Sapiens
ccggatggaggcgtgggtt

SEQ ID NO: 65301 - DNA, 17 bp, Homo Sapiens
ccggctagctcagtcgg

SEQ ID NO: 65302 - DNA, 21 bp, Homo Sapiens
ccggctagctcagtcggtaga

SEQ ID NO: 65303 - DNA, 22 bp, Homo Sapiens
ccggctagctcagtcggtagag

SEQ ID NO: 65304 - DNA, 23 bp, Homo Sapiens
ccggctagctcagtcggtagagc

SEQ ID NO: 65305 - DNA, 24 bp, Homo Sapiens
ccggctagctcagtcggtagagca

SEQ ID NO: 65306 - DNA, 16 bp, Homo Sapiens
ccggctcgaaggacca

SEQ ID NO: 65307 - DNA, 16 bp, Homo Sapiens
ccggctcggaggacca

SEQ ID NO: 65308 - DNA, 16 bp, Homo Sapiens
ccgggcggaaacacca

SEQ ID NO: 65309 - DNA, 16 bp, Homo Sapiens
ccgggtgccccctcca

SEQ ID NO: 65310 - DNA, 16 bp, Homo Sapiens
ccgggtttcggcacca

SEQ ID NO: 65311 - DNA, 18 bp, Homo Sapiens
ccggtaatcgcataaaac

SEQ ID NO: 65312 - DNA, 17 bp, Homo Sapiens
ccggttagctcagttgg

SEQ ID NO: 65313 - DNA, 19 bp, Homo Sapiens
ccgtagtgtagtggttatc

SEQ ID NO: 65314 - DNA, 20 bp, Homo Sapiens
ccgtagtgtagtggttatca

SEQ ID NO: 65315 - DNA, 16 bp, Homo Sapiens
ccgtgcgagaatacca

SEQ ID NO: 65316 - DNA, 20 bp, Homo Sapiens
ccgttaacttccaattaact

SEQ ID NO: 65317 - DNA, 16 bp, Homo Sapiens
cctatatatcttacca

SEQ ID NO: 65318 - DNA, 17 bp, Homo Sapiens
cctcacacggggcacca

SEQ ID NO: 65319 - DNA, 17 bp, Homo Sapiens
cctcacctggagcacca

SEQ ID NO: 65320 - DNA, 17 bp, Homo Sapiens
cctcagagggggcacca

SEQ ID NO: 65321 - DNA, 19 bp, Homo Sapiens
cctcagtaagttgcaatac

SEQ ID NO: 65322 - DNA, 16 bp, Homo Sapiens
cctcctcaaagcaata

SEQ ID NO: 65323 - DNA, 17 bp, Homo Sapiens
cctcctcaaagcaatac

SEQ ID NO: 65324 - DNA, 18 bp, Homo Sapiens
cctcctcaaagcaataca

SEQ ID NO: 65325 - DNA, 20 bp, Homo Sapiens
cctcctcaaagcaatacact

SEQ ID NO: 65326 - DNA, 18 bp, Homo Sapiens
cctcgttagcgcagtagg

SEQ ID NO: 65327 - DNA, 16 bp, Homo Sapiens
cctcttcttaacacca

SEQ ID NO: 65328 - DNA, 16 bp, Homo Sapiens
cctctttacagtgacc

SEQ ID NO: 65329 - DNA, 17 bp, Homo Sapiens
cctctttacagtgacca

SEQ ID NO: 65330 - DNA, 16 bp, Homo Sapiens
cctctttttaccacca

SEQ ID NO: 65331 - DNA, 16 bp, Homo Sapiens
cctgccgactacgcca

SEQ ID NO: 65332 - DNA, 16 bp, Homo Sapiens
cctgctcacagcgcca

SEQ ID NO: 65333 - DNA, 16 bp, Homo Sapiens
cctgctcgctgcgcca

SEQ ID NO: 65334 - DNA, 16 bp, Homo Sapiens
cctggctggctcgcca

SEQ ID NO: 65335 - DNA, 20 bp, Homo Sapiens
cctgggttcgaatcccagcg

SEQ ID NO: 65336 - DNA, 17 bp, Homo Sapiens
cctggtggtctagtggc

SEQ ID NO: 65337 - DNA, 20 bp, Homo Sapiens
cctggtggtctagtggttag

SEQ ID NO: 65338 - DNA, 22 bp, Homo Sapiens
cctggtggtctagtggttagga

SEQ ID NO: 65339 - DNA, 23 bp, Homo Sapiens
cctggtggtctagtggttaggat

SEQ ID NO: 65340 - DNA, 25 bp, Homo Sapiens
cctggtggtctagtggttaggattc

SEQ ID NO: 65341 - DNA, 16 bp, Homo Sapiens
cctgtcacgcgggaga

SEQ ID NO: 65342 - DNA, 16 bp, Homo Sapiens
cctgttcgtgacgcca

SEQ ID NO: 65343 - DNA, 19 bp, Homo Sapiens
ccttccaagcagttgaccc

SEQ ID NO: 65344 - DNA, 16 bp, Homo Sapiens
ccttcccgtactacca

SEQ ID NO: 65345 - DNA, 16 bp, Homo Sapiens
ccttcgatagctcagc

SEQ ID NO: 65346 - DNA, 17 bp, Homo Sapiens
ccttcgatagctcagct

SEQ ID NO: 65347 - DNA, 19 bp, Homo Sapiens
ccttcgatagctcagctgg

SEQ ID NO: 65348 - DNA, 19 bp, Homo Sapiens
ccttcgatagctcagttgg

SEQ ID NO: 65349 - DNA, 20 bp, Homo Sapiens
ccttcgatagctcagttggt

SEQ ID NO: 65350 - DNA, 22 bp, Homo Sapiens
ccttttaagttaaagattaaga

SEQ ID NO: 65351 - DNA, 25 bp, Homo Sapiens
ccttttaagttaaagattaagagaa

SEQ ID NO: 65352 - DNA, 18 bp, Homo Sapiens
cctttttccaaggacacc

SEQ ID NO: 65353 - DNA, 19 bp, Homo Sapiens
cctttttccaaggacacca

SEQ ID NO: 65354 - DNA, 16 bp, Homo Sapiens
cgaaaatgttggttat

SEQ ID NO: 65355 - DNA, 17 bp, Homo Sapiens
cgaaaatgttggttata

SEQ ID NO: 65356 - DNA, 18 bp, Homo Sapiens
cgaaaatgttggttatac

SEQ ID NO: 65357 - DNA, 19 bp, Homo Sapiens
cgaaaatgttggttatacc

SEQ ID NO: 65358 - DNA, 20 bp, Homo Sapiens
cgaaaatgttggttataccc

SEQ ID NO: 65359 - DNA, 23 bp, Homo Sapiens
cgaaaatgttggttatacccttc

SEQ ID NO: 65360 - DNA, 20 bp, Homo Sapiens
cgaaaccatcctctgctacc

SEQ ID NO: 65361 - DNA, 21 bp, Homo Sapiens
cgaaaccatcctctgctacca

SEQ ID NO: 65362 - DNA, 20 bp, Homo Sapiens
cgaaaccgggcggaaacacc

SEQ ID NO: 65363 - DNA, 21 bp, Homo Sapiens
cgaaaccgggcggaaacacca

SEQ ID NO: 65364 - DNA, 20 bp, Homo Sapiens
cgaatcccaccgctgccacc

SEQ ID NO: 65365 - DNA, 21 bp, Homo Sapiens
cgaatcccaccgctgccacca

SEQ ID NO: 65366 - DNA, 20 bp, Homo Sapiens
cgaatcccactcctgacacc

SEQ ID NO: 65367 - DNA, 20 bp, Homo Sapiens
cgaatcccacttctgacacc

SEQ ID NO: 65368 - DNA, 21 bp, Homo Sapiens
cgaatcccacttctgacacca

SEQ ID NO: 65369 - DNA, 20 bp, Homo Sapiens
cgaatcccagcggtgcctcc

SEQ ID NO: 65370 - DNA, 21 bp, Homo Sapiens
cgaatcccatcctcgtcgcca

SEQ ID NO: 65371 - DNA, 18 bp, Homo Sapiens
cgaatccgagtcacggca

SEQ ID NO: 65372 - DNA, 19 bp, Homo Sapiens
cgaatccgagtcacggcac

SEQ ID NO: 65373 - DNA, 20 bp, Homo Sapiens
cgaatccgagtcacggcacc

SEQ ID NO: 65374 - DNA, 21 bp, Homo Sapiens
cgaatccgagtcacggcacca

SEQ ID NO: 65375 - DNA, 21 bp, Homo Sapiens
cgaatccggctcgaaggacca

SEQ ID NO: 65376 - DNA, 20 bp, Homo Sapiens
cgaatcctgccgactacgcc

SEQ ID NO: 65377 - DNA, 21 bp, Homo Sapiens
cgaatcctgccgactacgcca

SEQ ID NO: 65378 - DNA, 17 bp, Homo Sapiens
cgaatgatttcgactca

SEQ ID NO: 65379 - DNA, 18 bp, Homo Sapiens
cgaatgatttcgactcat

SEQ ID NO: 65380 - DNA, 19 bp, Homo Sapiens
cgaatgatttcgactcatt

SEQ ID NO: 65381 - DNA, 21 bp, Homo Sapiens
cgaatgatttcgactcattaa

SEQ ID NO: 65382 - DNA, 23 bp, Homo Sapiens
cgaatgatttcgactcattaaat

SEQ ID NO: 65383 - DNA, 17 bp, Homo Sapiens
cgaccccttatttaccc

SEQ ID NO: 65384 - DNA, 18 bp, Homo Sapiens
cgaccccttatttacccc

SEQ ID NO: 65385 - DNA, 19 bp, Homo Sapiens
cgaccccttatttacccca

SEQ ID NO: 65386 - DNA, 20 bp, Homo Sapiens
cgaccgcgtggcctaatgga

SEQ ID NO: 65387 - DNA, 19 bp, Homo Sapiens
cgactcccggtgtgggaac

SEQ ID NO: 65388 - DNA, 20 bp, Homo Sapiens
cgactcccggtgtgggaacc

SEQ ID NO: 65389 - DNA, 21 bp, Homo Sapiens
cgactcccggtgtgggaacca

SEQ ID NO: 65390 - DNA, 20 bp, Homo Sapiens
cgactcctggctggctcgcc

SEQ ID NO: 65391 - DNA, 19 bp, Homo Sapiens
cgagaaagctcacaagaac

SEQ ID NO: 65392 - DNA, 20 bp, Homo Sapiens
cgagaaagctcacaagaact

SEQ ID NO: 65393 - DNA, 17 bp, Homo Sapiens
cgagaggtcccgggttc

SEQ ID NO: 65394 - DNA, 20 bp, Homo Sapiens
cgagcccacccagggacgcc

SEQ ID NO: 65395 - DNA, 21 bp, Homo Sapiens
cgagcccacccagggacgcca

SEQ ID NO: 65396 - DNA, 20 bp, Homo Sapiens
cgagtcccatctggggtgcc

SEQ ID NO: 65397 - DNA, 21 bp, Homo Sapiens
cgatccccggcatctccacca

SEQ ID NO: 65398 - DNA, 20 bp, Homo Sapiens
cgatccccgtacgggccacc

SEQ ID NO: 65399 - DNA, 20 bp, Homo Sapiens
cgatcccgggtttcggcacc

SEQ ID NO: 65400 - DNA, 19 bp, Homo Sapiens
cgattccccgacggggagc

SEQ ID NO: 65401 - DNA, 20 bp, Homo Sapiens
cgattccccgacggggagcc

SEQ ID NO: 65402 - DNA, 21 bp, Homo Sapiens
cgattccccgacggggagcca

SEQ ID NO: 65403 - DNA, 20 bp, Homo Sapiens
cgattcccggccaacgcacc

SEQ ID NO: 65404 - DNA, 21 bp, Homo Sapiens
cgattcccggccaacgcacca

SEQ ID NO: 65405 - DNA, 20 bp, Homo Sapiens
cgattcccggccaatgcacc

SEQ ID NO: 65406 - DNA, 21 bp, Homo Sapiens
cgattcccgggcggcgcacca

SEQ ID NO: 65407 - DNA, 20 bp, Homo Sapiens
cgattcccggtcagggaacc

SEQ ID NO: 65408 - DNA, 20 bp, Homo Sapiens
cgattccggctcgaaggacc

SEQ ID NO: 65409 - DNA, 21 bp, Homo Sapiens
cgattccggctcgaaggacca

SEQ ID NO: 65410 - DNA, 19 bp, Homo Sapiens
cgattctcatagtcctagc

SEQ ID NO: 65411 - DNA, 20 bp, Homo Sapiens
cgattctcatagtcctagcc

SEQ ID NO: 65412 - DNA, 21 bp, Homo Sapiens
cgattctcatagtcctagcca

SEQ ID NO: 65413 - DNA, 17 bp, Homo Sapiens
cgcagcaacctcggttc

SEQ ID NO: 65414 - DNA, 17 bp, Homo Sapiens
cgcataaaacttaaaac

SEQ ID NO: 65415 - DNA, 19 bp, Homo Sapiens
cgcataaaacttaaaactt

SEQ ID NO: 65416 - DNA, 20 bp, Homo Sapiens
cgcataaaacttaaaacttt

SEQ ID NO: 65417 - DNA, 18 bp, Homo Sapiens
cgccaaggtcgcgggttc

SEQ ID NO: 65418 - DNA, 20 bp, Homo Sapiens
cgcccggatagctcagtcgg

SEQ ID NO: 65419 - DNA, 16 bp, Homo Sapiens
cgcgtggcctaatgga

SEQ ID NO: 65420 - DNA, 18 bp, Homo Sapiens
cgctggtgtagtggtatc

SEQ ID NO: 65421 - DNA, 25 bp, Homo Sapiens
cgctggtgtagtggtatcatgcaag

SEQ ID NO: 65422 - DNA, 16 bp, Homo Sapiens
cggaagcgtgctgggc

SEQ ID NO: 65423 - DNA, 17 bp, Homo Sapiens
cggaagcgtgctgggcc

SEQ ID NO: 65424 - DNA, 18 bp, Homo Sapiens
cggaagcgtgctgggccc

SEQ ID NO: 65425 - DNA, 17 bp, Homo Sapiens
cggagaattttggattc

SEQ ID NO: 65426 - DNA, 16 bp, Homo Sapiens
cggagatgaaaacctt

SEQ ID NO: 65427 - DNA, 17 bp, Homo Sapiens
cggagatgaaaaccttt

SEQ ID NO: 65428 - DNA, 18 bp, Homo Sapiens
cggagatgaaaacctttt

SEQ ID NO: 65429 - DNA, 19 bp, Homo Sapiens
cggagatgaaaaccttttt

SEQ ID NO: 65430 - DNA, 20 bp, Homo Sapiens
cggagatgaaaacctttttc

SEQ ID NO: 65431 - DNA, 21 bp, Homo Sapiens
cggagatgaaaacctttttcc

SEQ ID NO: 65432 - DNA, 22 bp, Homo Sapiens
cggagatgaaaacctttttcca

SEQ ID NO: 65433 - DNA, 24 bp, Homo Sapiens
cggagatgaaaacctttttccaag

SEQ ID NO: 65434 - DNA, 25 bp, Homo Sapiens
cggagatgaaaacctttttccaagg

SEQ ID NO: 65435 - DNA, 16 bp, Homo Sapiens
cggatagctcagtcgg

SEQ ID NO: 65436 - DNA, 18 bp, Homo Sapiens
cggatagctcagtcggta

SEQ ID NO: 65437 - DNA, 19 bp, Homo Sapiens
cggatagctcagtcggtag

SEQ ID NO: 65438 - DNA, 20 bp, Homo Sapiens
cggatagctcagtcggtaga

SEQ ID NO: 65439 - DNA, 22 bp, Homo Sapiens
cggatagctcagtcggtagagc

SEQ ID NO: 65440 - DNA, 24 bp, Homo Sapiens
cggatagctcagtcggtagagcat

SEQ ID NO: 65441 - DNA, 25 bp, Homo Sapiens
cggatagctcagtcggtagagcatc

SEQ ID NO: 65442 - DNA, 16 bp, Homo Sapiens
cggatcagaagattga

SEQ ID NO: 65443 - DNA, 17 bp, Homo Sapiens
cggatcagaagattgag

SEQ ID NO: 65444 - DNA, 16 bp, Homo Sapiens
cggatggaggcgtggg

SEQ ID NO: 65445 - DNA, 17 bp, Homo Sapiens
cggatggaggcgtgggt

SEQ ID NO: 65446 - DNA, 18 bp, Homo Sapiens
cggatggaggcgtgggtt

SEQ ID NO: 65447 - DNA, 16 bp, Homo Sapiens
cggctagctcagtcgg

SEQ ID NO: 65448 - DNA, 18 bp, Homo Sapiens
cggctagctcagtcggta

SEQ ID NO: 65449 - DNA, 19 bp, Homo Sapiens
cggctagctcagtcggtag

SEQ ID NO: 65450 - DNA, 20 bp, Homo Sapiens
cggctagctcagtcggtaga

SEQ ID NO: 65451 - DNA, 25 bp, Homo Sapiens
cggctagctcagtcggtagagcatg

SEQ ID NO: 65452 - DNA, 20 bp, Homo Sapiens
cggctccgtggcgcaatgga

SEQ ID NO: 65453 - DNA, 20 bp, Homo Sapiens
cggctctgtggcgcaatgga

SEQ ID NO: 65454 - DNA, 20 bp, Homo Sapiens
cgggccagtggcgcaatgga

SEQ ID NO: 65455 - DNA, 17 bp, Homo Sapiens
cgggcccataccccgaa

SEQ ID NO: 65456 - DNA, 16 bp, Homo Sapiens
cgggctcacatcaccc

SEQ ID NO: 65457 - DNA, 17 bp, Homo Sapiens
cgggttcaaatcccgga

SEQ ID NO: 65458 - DNA, 17 bp, Homo Sapiens
cggtaatcgcataaaac

SEQ ID NO: 65459 - DNA, 16 bp, Homo Sapiens
cggtagagcatcagac

SEQ ID NO: 65460 - DNA, 17 bp, Homo Sapiens
cggtagagcatcagact

SEQ ID NO: 65461 - DNA, 20 bp, Homo Sapiens
cggtagagcatcagactttt

SEQ ID NO: 65462 - DNA, 18 bp, Homo Sapiens
cggtagagcatgagactc

SEQ ID NO: 65463 - DNA, 19 bp, Homo Sapiens
cggtagagcatgagactct

SEQ ID NO: 65464 - DNA, 20 bp, Homo Sapiens
cggtagagcatgagactctt

SEQ ID NO: 65465 - DNA, 18 bp, Homo Sapiens
cggtagagcatgggactc

SEQ ID NO: 65466 - DNA, 19 bp, Homo Sapiens
cggtagagcatgggactct

SEQ ID NO: 65467 - DNA, 17 bp, Homo Sapiens
cggtagcgtggccgagc

SEQ ID NO: 65468 - DNA, 17 bp, Homo Sapiens
cggtctaaggcgctgcg

SEQ ID NO: 65469 - DNA, 20 bp, Homo Sapiens
cggtctaaggcgctgcgttc

SEQ ID NO: 65470 - DNA, 17 bp, Homo Sapiens
cggtctaaggcgctgga

SEQ ID NO: 65471 - DNA, 20 bp, Homo Sapiens
cggttaggattcctggtttt

SEQ ID NO: 65472 - DNA, 21 bp, Homo Sapiens
cggttaggattcctggttttc

SEQ ID NO: 65473 - DNA, 16 bp, Homo Sapiens
cggttcgaaaccgggc

SEQ ID NO: 65474 - DNA, 16 bp, Homo Sapiens
cgtagtcgtggccgag

SEQ ID NO: 65475 - DNA, 17 bp, Homo Sapiens
cgtagtcgtggccgagt

SEQ ID NO: 65476 - DNA, 19 bp, Homo Sapiens
cgtagtcgtggccgagtgg

SEQ ID NO: 65477 - DNA, 17 bp, Homo Sapiens
cgtatagtggttagtac

SEQ ID NO: 65478 - DNA, 20 bp, Homo Sapiens
cgtatagtggttagtactct

SEQ ID NO: 65479 - DNA, 22 bp, Homo Sapiens
cgtatagtggttagtactctgc

SEQ ID NO: 65480 - DNA, 20 bp, Homo Sapiens
cgtctctgtggcgcaatgga

SEQ ID NO: 65481 - DNA, 21 bp, Homo Sapiens
cgtctctgtggcgcaatggac

SEQ ID NO: 65482 - DNA, 19 bp, Homo Sapiens
cgtgctgggcccataaccc

SEQ ID NO: 65483 - DNA, 22 bp, Homo Sapiens
cgtgctgggcccataacccaga

SEQ ID NO: 65484 - DNA, 18 bp, Homo Sapiens
cgtggttgtagtccgtgc

SEQ ID NO: 65485 - DNA, 19 bp, Homo Sapiens
cgtggttgtagtccgtgcg

SEQ ID NO: 65486 - DNA, 20 bp, Homo Sapiens
cgtggttgtagtccgtgcga

SEQ ID NO: 65487 - DNA, 21 bp, Homo Sapiens
cgtggttgtagtccgtgcgag

SEQ ID NO: 65488 - DNA, 22 bp, Homo Sapiens
cgtggttgtagtccgtgcgaga

SEQ ID NO: 65489 - DNA, 25 bp, Homo Sapiens
cgtggttgtagtccgtgcgagaata

SEQ ID NO: 65490 - DNA, 18 bp, Homo Sapiens
cgttcaggtcgcagtctc

SEQ ID NO: 65491 - DNA, 19 bp, Homo Sapiens
cgttcaggtcgcagtctcc

SEQ ID NO: 65492 - DNA, 20 bp, Homo Sapiens
cgttcaggtcgcagtctccc

SEQ ID NO: 65493 - DNA, 20 bp, Homo Sapiens
cgtttccgtagtgtagtggt

SEQ ID NO: 65494 - DNA, 16 bp, Homo Sapiens
ctaaataagctatcgg

SEQ ID NO: 65495 - DNA, 17 bp, Homo Sapiens
ctaaataagctatcggg

SEQ ID NO: 65496 - DNA, 18 bp, Homo Sapiens
ctaaataagctatcgggc

SEQ ID NO: 65497 - DNA, 19 bp, Homo Sapiens
ctaaataagctatcgggcc

SEQ ID NO: 65498 - DNA, 20 bp, Homo Sapiens
ctaaataagctatcgggccc

SEQ ID NO: 65499 - DNA, 21 bp, Homo Sapiens
ctaaataagctatcgggccca

SEQ ID NO: 65500 - DNA, 22 bp, Homo Sapiens
ctaaatcctatatatcttacca

SEQ ID NO: 65501 - DNA, 17 bp, Homo Sapiens
ctaacaacatggctttc

SEQ ID NO: 65502 - DNA, 18 bp, Homo Sapiens
ctaacaacatggctttct

SEQ ID NO: 65503 - DNA, 19 bp, Homo Sapiens
ctaacaacatggctttctc

SEQ ID NO: 65504 - DNA, 20 bp, Homo Sapiens
ctaacaacatggctttctca

SEQ ID NO: 65505 - DNA, 22 bp, Homo Sapiens
ctaacaacatggctttctcacc

SEQ ID NO: 65506 - DNA, 23 bp, Homo Sapiens
ctaacaacatggctttctcacca

SEQ ID NO: 65507 - DNA, 16 bp, Homo Sapiens
ctaagccagggattgt

SEQ ID NO: 65508 - DNA, 17 bp, Homo Sapiens
ctaagccagggattgtg

SEQ ID NO: 65509 - DNA, 18 bp, Homo Sapiens
ctaagccagggattgtgg

SEQ ID NO: 65510 - DNA, 20 bp, Homo Sapiens
ctaagccagggattgtgggt

SEQ ID NO: 65511 - DNA, 17 bp, Homo Sapiens
ctaatggataaggcact

SEQ ID NO: 65512 - DNA, 18 bp, Homo Sapiens
ctaatggataaggcactg

SEQ ID NO: 65513 - DNA, 18 bp, Homo Sapiens
ctaatggataaggcatca

SEQ ID NO: 65514 - DNA, 18 bp, Homo Sapiens
ctaatggataaggcattg

SEQ ID NO: 65515 - DNA, 20 bp, Homo Sapiens
ctaatggtggagttaaagac

SEQ ID NO: 65516 - DNA, 21 bp, Homo Sapiens
ctaatggtggagttaaagact

SEQ ID NO: 65517 - DNA, 16 bp, Homo Sapiens
ctagctcagtcggtag

SEQ ID NO: 65518 - DNA, 17 bp, Homo Sapiens
ctagctcagtcggtaga

SEQ ID NO: 65519 - DNA, 19 bp, Homo Sapiens
ctagctcagtcggtagagc

SEQ ID NO: 65520 - DNA, 18 bp, Homo Sapiens
ctaggattcggcgctttc

SEQ ID NO: 65521 - DNA, 19 bp, Homo Sapiens
ctaggggtatgattctcgc

SEQ ID NO: 65522 - DNA, 19 bp, Homo Sapiens
ctagtggttaggattcggc

SEQ ID NO: 65523 - DNA, 21 bp, Homo Sapiens
ctagtggttaggattcggcgc

SEQ ID NO: 65524 - DNA, 23 bp, Homo Sapiens
ctagtggttaggattcggcgctc

SEQ ID NO: 65525 - DNA, 16 bp, Homo Sapiens
ctatccattggtctta

SEQ ID NO: 65526 - DNA, 19 bp, Homo Sapiens
ctatccattggtcttaggc

SEQ ID NO: 65527 - DNA, 16 bp, Homo Sapiens
ctatcgggcccatacc

SEQ ID NO: 65528 - DNA, 17 bp, Homo Sapiens
ctatcgggcccataccc

SEQ ID NO: 65529 - DNA, 19 bp, Homo Sapiens
ctatcgggcccataccccg

SEQ ID NO: 65530 - DNA, 20 bp, Homo Sapiens
ctatcgggcccataccccga

SEQ ID NO: 65531 - DNA, 21 bp, Homo Sapiens
ctatcgggcccataccccgaa

SEQ ID NO: 65532 - DNA, 22 bp, Homo Sapiens
ctatcgggcccataccccgaaa

SEQ ID NO: 65533 - DNA, 19 bp, Homo Sapiens
ctcaaagcaatacactgaa

SEQ ID NO: 65534 - DNA, 16 bp, Homo Sapiens
ctcaagttctggtctc

SEQ ID NO: 65535 - DNA, 17 bp, Homo Sapiens
ctcaagttctggtctcc

SEQ ID NO: 65536 - DNA, 20 bp, Homo Sapiens
ctcaagttctggtctccgga

SEQ ID NO: 65537 - DNA, 17 bp, Homo Sapiens
ctcacaagaactgctaa

SEQ ID NO: 65538 - DNA, 18 bp, Homo Sapiens
ctcacaagaactgctaac

SEQ ID NO: 65539 - DNA, 19 bp, Homo Sapiens
ctcacaagaactgctaact

SEQ ID NO: 65540 - DNA, 20 bp, Homo Sapiens
ctcacaagaactgctaactc

SEQ ID NO: 65541 - DNA, 21 bp, Homo Sapiens
ctcacaagaactgctaactca

SEQ ID NO: 65542 - DNA, 16 bp, Homo Sapiens
ctcacacggggcacca

SEQ ID NO: 65543 - DNA, 16 bp, Homo Sapiens
ctcacatcaccccata

SEQ ID NO: 65544 - DNA, 17 bp, Homo Sapiens
ctcacatcaccccataa

SEQ ID NO: 65545 - DNA, 18 bp, Homo Sapiens
ctcacatcaccccataaa

SEQ ID NO: 65546 - DNA, 19 bp, Homo Sapiens
ctcacatcaccccataaac

SEQ ID NO: 65547 - DNA, 20 bp, Homo Sapiens
ctcacatcaccccataaaca

SEQ ID NO: 65548 - DNA, 22 bp, Homo Sapiens
ctcacatcaccccataaacacc

SEQ ID NO: 65549 - DNA, 23 bp, Homo Sapiens
ctcacatcaccccataaacacca

SEQ ID NO: 65550 - DNA, 16 bp, Homo Sapiens
ctcacctggagcacca

SEQ ID NO: 65551 - DNA, 16 bp, Homo Sapiens
ctcagagggggcacca

SEQ ID NO: 65552 - DNA, 16 bp, Homo Sapiens
ctcagggatgggttcg

SEQ ID NO: 65553 - DNA, 17 bp, Homo Sapiens
ctcagggtcgtgggttc

SEQ ID NO: 65554 - DNA, 18 bp, Homo Sapiens
ctcagggtcgtgggttcg

SEQ ID NO: 65555 - DNA, 18 bp, Homo Sapiens
ctcagtaagttgcaatac

SEQ ID NO: 65556 - DNA, 19 bp, Homo Sapiens
ctcagtaagttgcaatact

SEQ ID NO: 65557 - DNA, 20 bp, Homo Sapiens
ctcagtaagttgcaatactt

SEQ ID NO: 65558 - DNA, 21 bp, Homo Sapiens
ctcagtaagttgcaatactta

SEQ ID NO: 65559 - DNA, 18 bp, Homo Sapiens
ctcagtcggtagagcatc

SEQ ID NO: 65560 - DNA, 19 bp, Homo Sapiens
ctcagtcggtagagcatca

SEQ ID NO: 65561 - DNA, 20 bp, Homo Sapiens
ctcagtcggtagagcatcag

SEQ ID NO: 65562 - DNA, 21 bp, Homo Sapiens
ctcagtcggtagagcatcaga

SEQ ID NO: 65563 - DNA, 22 bp, Homo Sapiens
ctcagtcggtagagcatcagac

SEQ ID NO: 65564 - DNA, 23 bp, Homo Sapiens
ctcagtcggtagagcatcagact

SEQ ID NO: 65565 - DNA, 18 bp, Homo Sapiens
ctcagtcggtagagcatg

SEQ ID NO: 65566 - DNA, 19 bp, Homo Sapiens
ctcagtcggtagagcatga

SEQ ID NO: 65567 - DNA, 20 bp, Homo Sapiens
ctcagtcggtagagcatgag

SEQ ID NO: 65568 - DNA, 21 bp, Homo Sapiens
ctcagtcggtagagcatgaga

SEQ ID NO: 65569 - DNA, 22 bp, Homo Sapiens
ctcagtcggtagagcatgagac

SEQ ID NO: 65570 - DNA, 23 bp, Homo Sapiens
ctcagtcggtagagcatgagact

SEQ ID NO: 65571 - DNA, 24 bp, Homo Sapiens
ctcagtcggtagagcatgagactc

SEQ ID NO: 65572 - DNA, 25 bp, Homo Sapiens
ctcagtcggtagagcatgagactct

SEQ ID NO: 65573 - DNA, 19 bp, Homo Sapiens
ctcagtcggtagagcatgg

SEQ ID NO: 65574 - DNA, 20 bp, Homo Sapiens
ctcagtcggtagagcatggg

SEQ ID NO: 65575 - DNA, 21 bp, Homo Sapiens
ctcagtcggtagagcatggga

SEQ ID NO: 65576 - DNA, 22 bp, Homo Sapiens
ctcagtcggtagagcatgggac

SEQ ID NO: 65577 - DNA, 23 bp, Homo Sapiens
ctcagtcggtagagcatgggact

SEQ ID NO: 65578 - DNA, 24 bp, Homo Sapiens
ctcagtcggtagagcatgggactc

SEQ ID NO: 65579 - DNA, 25 bp, Homo Sapiens
ctcagtcggtagagcatgggactct

SEQ ID NO: 65580 - DNA, 20 bp, Homo Sapiens
ctcagtggtagagcatttga

SEQ ID NO: 65581 - DNA, 17 bp, Homo Sapiens
ctccaaataaaagtacc

SEQ ID NO: 65582 - DNA, 18 bp, Homo Sapiens
ctccaaataaaagtacca

SEQ ID NO: 65583 - DNA, 16 bp, Homo Sapiens
ctcccggtatgggaac

SEQ ID NO: 65584 - DNA, 16 bp, Homo Sapiens
ctcccggtgtgggaac

SEQ ID NO: 65585 - DNA, 17 bp, Homo Sapiens
ctcccggtgtgggaacc

SEQ ID NO: 65586 - DNA, 18 bp, Homo Sapiens
ctcccggtgtgggaacca

SEQ ID NO: 65587 - DNA, 16 bp, Homo Sapiens
ctccgaggtgattttc

SEQ ID NO: 65588 - DNA, 17 bp, Homo Sapiens
ctccgaggtgattttca

SEQ ID NO: 65589 - DNA, 18 bp, Homo Sapiens
ctccgaggtgattttcat

SEQ ID NO: 65590 - DNA, 19 bp, Homo Sapiens
ctccgaggtgattttcata

SEQ ID NO: 65591 - DNA, 20 bp, Homo Sapiens
ctccgaggtgattttcatat

SEQ ID NO: 65592 - DNA, 21 bp, Homo Sapiens
ctccgaggtgattttcatatt

SEQ ID NO: 65593 - DNA, 22 bp, Homo Sapiens
ctccgaggtgattttcatattg

SEQ ID NO: 65594 - DNA, 23 bp, Homo Sapiens
ctccgaggtgattttcatattga

SEQ ID NO: 65595 - DNA, 17 bp, Homo Sapiens
ctccgtggcgcaatgga

SEQ ID NO: 65596 - DNA, 16 bp, Homo Sapiens
ctcctcaaagcaatac

SEQ ID NO: 65597 - DNA, 17 bp, Homo Sapiens
ctcctcaaagcaataca

SEQ ID NO: 65598 - DNA, 18 bp, Homo Sapiens
ctcctcaaagcaatacac

SEQ ID NO: 65599 - DNA, 19 bp, Homo Sapiens
ctcctcaaagcaatacact

SEQ ID NO: 65600 - DNA, 16 bp, Homo Sapiens
ctcctggctggctcgc

SEQ ID NO: 65601 - DNA, 17 bp, Homo Sapiens
ctcctggctggctcgcc

SEQ ID NO: 65602 - DNA, 18 bp, Homo Sapiens
ctcctggctggctcgcca

SEQ ID NO: 65603 - DNA, 16 bp, Homo Sapiens
ctcgctggggcctcca

SEQ ID NO: 65604 - DNA, 16 bp, Homo Sapiens
ctcggtggaacctcca

SEQ ID NO: 65605 - DNA, 16 bp, Homo Sapiens
ctcggtgggacctcca

SEQ ID NO: 65606 - DNA, 17 bp, Homo Sapiens
ctcgttagcgcagtagg

SEQ ID NO: 65607 - DNA, 17 bp, Homo Sapiens
ctcgttagtatagtggt

SEQ ID NO: 65608 - DNA, 20 bp, Homo Sapiens
ctctgaatccagcgatccga

SEQ ID NO: 65609 - DNA, 20 bp, Homo Sapiens
ctctggactctgaatccagc

SEQ ID NO: 65610 - DNA, 17 bp, Homo Sapiens
ctctgtggcgcaatgga

SEQ ID NO: 65611 - DNA, 18 bp, Homo Sapiens
ctctgtggcgcaatggac

SEQ ID NO: 65612 - DNA, 18 bp, Homo Sapiens
ctcttaatcccagggtcg

SEQ ID NO: 65613 - DNA, 19 bp, Homo Sapiens
ctcttaatcccagggtcgt

SEQ ID NO: 65614 - DNA, 16 bp, Homo Sapiens
ctctttacagtgacca

SEQ ID NO: 65615 - DNA, 16 bp, Homo Sapiens
ctgaaaatgtttagac

SEQ ID NO: 65616 - DNA, 20 bp, Homo Sapiens
ctgaaaatgtttagacgggc

SEQ ID NO: 65617 - DNA, 17 bp, Homo Sapiens
ctgaaggtcctgagttc

SEQ ID NO: 65618 - DNA, 18 bp, Homo Sapiens
ctgaaggtcctgagttcg

SEQ ID NO: 65619 - DNA, 17 bp, Homo Sapiens
ctgaaggtcgtgagttc

SEQ ID NO: 65620 - DNA, 18 bp, Homo Sapiens
ctgaaggtcgtgagttcg

SEQ ID NO: 65621 - DNA, 19 bp, Homo Sapiens
ctgaatccagcgatccgag

SEQ ID NO: 65622 - DNA, 22 bp, Homo Sapiens
ctgaatccagcgatccgagttc

SEQ ID NO: 65623 - DNA, 23 bp, Homo Sapiens
ctgaatccagcgatccgagttca

SEQ ID NO: 65624 - DNA, 16 bp, Homo Sapiens
ctgacaacagaggctt

SEQ ID NO: 65625 - DNA, 17 bp, Homo Sapiens
ctgacaacagaggctta

SEQ ID NO: 65626 - DNA, 18 bp, Homo Sapiens
ctgacaacagaggcttac

SEQ ID NO: 65627 - DNA, 19 bp, Homo Sapiens
ctgacaacagaggcttacg

SEQ ID NO: 65628 - DNA, 19 bp, Homo Sapiens
ctgacttcggatcagaaga

SEQ ID NO: 65629 - DNA, 17 bp, Homo Sapiens
ctgagggtccagggttc

SEQ ID NO: 65630 - DNA, 18 bp, Homo Sapiens
ctgagggtccagggttca

SEQ ID NO: 65631 - DNA, 18 bp, Homo Sapiens
ctgagtgaagcattggac

SEQ ID NO: 65632 - DNA, 19 bp, Homo Sapiens
ctgattccggatcagaaga

SEQ ID NO: 65633 - DNA, 18 bp, Homo Sapiens
ctgctaactcatgccccc

SEQ ID NO: 65634 - DNA, 18 bp, Homo Sapiens
ctggactctgaatccagc

SEQ ID NO: 65635 - DNA, 19 bp, Homo Sapiens
ctggactctgaatccagcg

SEQ ID NO: 65636 - DNA, 20 bp, Homo Sapiens
ctggactctgaatccagcga

SEQ ID NO: 65637 - DNA, 17 bp, Homo Sapiens
ctggggattgtgggttc

SEQ ID NO: 65638 - DNA, 18 bp, Homo Sapiens
ctggggattgtgggttcg

SEQ ID NO: 65639 - DNA, 19 bp, Homo Sapiens
ctggtggtctagtggttag

SEQ ID NO: 65640 - DNA, 20 bp, Homo Sapiens
ctggtggtctagtggttagg

SEQ ID NO: 65641 - DNA, 21 bp, Homo Sapiens
ctggtggtctagtggttagga

SEQ ID NO: 65642 - DNA, 22 bp, Homo Sapiens
ctggtggtctagtggttaggat

SEQ ID NO: 65643 - DNA, 23 bp, Homo Sapiens
ctggtggtctagtggttaggatt

SEQ ID NO: 65644 - DNA, 24 bp, Homo Sapiens
ctggtggtctagtggttaggattc

SEQ ID NO: 65645 - DNA, 25 bp, Homo Sapiens
ctggtggtctagtggttaggattcg

SEQ ID NO: 65646 - DNA, 20 bp, Homo Sapiens
ctggtgtagtggtatcatgc

SEQ ID NO: 65647 - DNA, 21 bp, Homo Sapiens
ctggtgtagtggtatcatgca

SEQ ID NO: 65648 - DNA, 23 bp, Homo Sapiens
ctggtgtagtggtatcatgcaag

SEQ ID NO: 65649 - DNA, 16 bp, Homo Sapiens
ctgtcacgcgggagac

SEQ ID NO: 65650 - DNA, 16 bp, Homo Sapiens
ctgtggcgcaatggac

SEQ ID NO: 65651 - DNA, 20 bp, Homo Sapiens
cttaaaactttacagtcaga

SEQ ID NO: 65652 - DNA, 24 bp, Homo Sapiens
cttaaaactttacagtcagaggtt

SEQ ID NO: 65653 - DNA, 16 bp, Homo Sapiens
cttaaacccccttatt

SEQ ID NO: 65654 - DNA, 19 bp, Homo Sapiens
cttaaacccccttatttct

SEQ ID NO: 65655 - DNA, 20 bp, Homo Sapiens
cttaaacccccttatttcta

SEQ ID NO: 65656 - DNA, 21 bp, Homo Sapiens
cttaaacccccttatttctac

SEQ ID NO: 65657 - DNA, 22 bp, Homo Sapiens
cttaaacccccttatttctacc

SEQ ID NO: 65658 - DNA, 23 bp, Homo Sapiens
cttaaacccccttatttctacca

SEQ ID NO: 65659 - DNA, 18 bp, Homo Sapiens
cttaacacaaagcaccca

SEQ ID NO: 65660 - DNA, 16 bp, Homo Sapiens
cttaacttgaccgctc

SEQ ID NO: 65661 - DNA, 17 bp, Homo Sapiens
cttaacttgaccgctct

SEQ ID NO: 65662 - DNA, 18 bp, Homo Sapiens
cttaacttgaccgctctg

SEQ ID NO: 65663 - DNA, 19 bp, Homo Sapiens
cttaacttgaccgctctga

SEQ ID NO: 65664 - DNA, 20 bp, Homo Sapiens
cttaacttgaccgctctgac

SEQ ID NO: 65665 - DNA, 21 bp, Homo Sapiens
cttaacttgaccgctctgacc

SEQ ID NO: 65666 - DNA, 22 bp, Homo Sapiens
cttaacttgaccgctctgacca

SEQ ID NO: 65667 - DNA, 16 bp, Homo Sapiens
cttaagatccaatgga

SEQ ID NO: 65668 - DNA, 17 bp, Homo Sapiens
cttaagatccaatggac

SEQ ID NO: 65669 - DNA, 19 bp, Homo Sapiens
cttaagatccaatggacat

SEQ ID NO: 65670 - DNA, 17 bp, Homo Sapiens
cttacacttaggagatt

SEQ ID NO: 65671 - DNA, 18 bp, Homo Sapiens
cttacacttaggagattt

SEQ ID NO: 65672 - DNA, 19 bp, Homo Sapiens
cttacacttaggagatttc

SEQ ID NO: 65673 - DNA, 20 bp, Homo Sapiens
cttacacttaggagatttca

SEQ ID NO: 65674 - DNA, 21 bp, Homo Sapiens
cttacacttaggagatttcaa

SEQ ID NO: 65675 - DNA, 22 bp, Homo Sapiens
cttacacttaggagatttcaac

SEQ ID NO: 65676 - DNA, 21 bp, Homo Sapiens
cttacgaccccttatttaccc

SEQ ID NO: 65677 - DNA, 22 bp, Homo Sapiens
cttacgaccccttatttacccc

SEQ ID NO: 65678 - DNA, 23 bp, Homo Sapiens
cttacgaccccttatttacccca

SEQ ID NO: 65679 - DNA, 19 bp, Homo Sapiens
cttagcattaaccttttaa

SEQ ID NO: 65680 - DNA, 16 bp, Homo Sapiens
cttaggagatttcaac

SEQ ID NO: 65681 - DNA, 17 bp, Homo Sapiens
cttaggagatttcaact

SEQ ID NO: 65682 - DNA, 18 bp, Homo Sapiens
cttaggagatttcaactt

SEQ ID NO: 65683 - DNA, 19 bp, Homo Sapiens
cttaggagatttcaactta

SEQ ID NO: 65684 - DNA, 20 bp, Homo Sapiens
cttaggagatttcaacttaa

SEQ ID NO: 65685 - DNA, 21 bp, Homo Sapiens
cttaggagatttcaacttaac

SEQ ID NO: 65686 - DNA, 22 bp, Homo Sapiens
cttaggagatttcaacttaact

SEQ ID NO: 65687 - DNA, 16 bp, Homo Sapiens
cttcaaacctgccggg

SEQ ID NO: 65688 - DNA, 18 bp, Homo Sapiens
cttcaaacctgccggggc

SEQ ID NO: 65689 - DNA, 19 bp, Homo Sapiens
cttcaaacctgccggggct

SEQ ID NO: 65690 - DNA, 20 bp, Homo Sapiens
cttcaaacctgccggggctt

SEQ ID NO: 65691 - DNA, 21 bp, Homo Sapiens
cttcaaacctgccggggcttc

SEQ ID NO: 65692 - DNA, 22 bp, Homo Sapiens
cttcaaacctgccggggcttcc

SEQ ID NO: 65693 - DNA, 19 bp, Homo Sapiens
cttcggatcagaagattga

SEQ ID NO: 65694 - DNA, 16 bp, Homo Sapiens
cttcgggggcgtgggt

SEQ ID NO: 65695 - DNA, 16 bp, Homo Sapiens
cttgaccgctctgacc

SEQ ID NO: 65696 - DNA, 17 bp, Homo Sapiens
cttgaccgctctgacca

SEQ ID NO: 65697 - DNA, 17 bp, Homo Sapiens
ctttacagtcagaggtt

SEQ ID NO: 65698 - DNA, 18 bp, Homo Sapiens
ctttacagtcagaggttc

SEQ ID NO: 65699 - DNA, 19 bp, Homo Sapiens
ctttacagtcagaggttca

SEQ ID NO: 65700 - DNA, 18 bp, Homo Sapiens
ctttgatagagtaaataa

SEQ ID NO: 65701 - DNA, 19 bp, Homo Sapiens
ctttgatagagtaaataat

SEQ ID NO: 65702 - DNA, 16 bp, Homo Sapiens
ctttgcacgcgtgggt

SEQ ID NO: 65703 - DNA, 16 bp, Homo Sapiens
ctttgggtgctaatgg

SEQ ID NO: 65704 - DNA, 20 bp, Homo Sapiens
cttttaagttaaagattaag

SEQ ID NO: 65705 - DNA, 21 bp, Homo Sapiens
cttttaagttaaagattaaga

SEQ ID NO: 65706 - DNA, 22 bp, Homo Sapiens
cttttaagttaaagattaagag

SEQ ID NO: 65707 - DNA, 23 bp, Homo Sapiens
cttttaagttaaagattaagaga

SEQ ID NO: 65708 - DNA, 24 bp, Homo Sapiens
cttttaagttaaagattaagagaa

SEQ ID NO: 65709 - DNA, 16 bp, Homo Sapiens
ctttttccaaggacac

SEQ ID NO: 65710 - DNA, 17 bp, Homo Sapiens
ctttttccaaggacacc

SEQ ID NO: 65711 - DNA, 18 bp, Homo Sapiens
ctttttccaaggacacca

SEQ ID NO: 65712 - DNA, 16 bp, Homo Sapiens
gaaaaagtcatggagg

SEQ ID NO: 65713 - DNA, 17 bp, Homo Sapiens
gaaaaagtcatggaggc

SEQ ID NO: 65714 - DNA, 18 bp, Homo Sapiens
gaaaaagtcatggaggcc

SEQ ID NO: 65715 - DNA, 19 bp, Homo Sapiens
gaaaaagtcatggaggcca

SEQ ID NO: 65716 - DNA, 20 bp, Homo Sapiens
gaaaaagtcatggaggccat

SEQ ID NO: 65717 - DNA, 21 bp, Homo Sapiens
gaaaaagtcatggaggccatg

SEQ ID NO: 65718 - DNA, 22 bp, Homo Sapiens
gaaaaagtcatggaggccatgg

SEQ ID NO: 65719 - DNA, 24 bp, Homo Sapiens
gaaaaagtcatggaggccatgggg

SEQ ID NO: 65720 - DNA, 25 bp, Homo Sapiens
gaaaaagtcatggaggccatggggt

SEQ ID NO: 65721 - DNA, 24 bp, Homo Sapiens
gaaaacctttttccaaggacacca

SEQ ID NO: 65722 - DNA, 18 bp, Homo Sapiens
gaaaatgttggttatacc

SEQ ID NO: 65723 - DNA, 19 bp, Homo Sapiens
gaaaatgttggttataccc

SEQ ID NO: 65724 - DNA, 16 bp, Homo Sapiens
gaaaatgtttagacgg

SEQ ID NO: 65725 - DNA, 17 bp, Homo Sapiens
gaaaatgtttagacggg

SEQ ID NO: 65726 - DNA, 18 bp, Homo Sapiens
gaaaatgtttagacgggc

SEQ ID NO: 65727 - DNA, 19 bp, Homo Sapiens
gaaaatgtttagacgggct

SEQ ID NO: 65728 - DNA, 20 bp, Homo Sapiens
gaaaatgtttagacgggctc

SEQ ID NO: 65729 - DNA, 21 bp, Homo Sapiens
gaaaatgtttagacgggctca

SEQ ID NO: 65730 - DNA, 22 bp, Homo Sapiens
gaaaatgtttagacgggctcac

SEQ ID NO: 65731 - DNA, 23 bp, Homo Sapiens
gaaaatgtttagacgggctcaca

SEQ ID NO: 65732 - DNA, 24 bp, Homo Sapiens
gaaaatgtttagacgggctcacat

SEQ ID NO: 65733 - DNA, 20 bp, Homo Sapiens
gaaaccgggcggaaacacca

SEQ ID NO: 65734 - DNA, 16 bp, Homo Sapiens
gaaagctcacaagaac

SEQ ID NO: 65735 - DNA, 17 bp, Homo Sapiens
gaaagctcacaagaact

SEQ ID NO: 65736 - DNA, 18 bp, Homo Sapiens
gaaagctcacaagaactg

SEQ ID NO: 65737 - DNA, 19 bp, Homo Sapiens
gaaagctcacaagaactgc

SEQ ID NO: 65738 - DNA, 20 bp, Homo Sapiens
gaaagctcacaagaactgct

SEQ ID NO: 65739 - DNA, 21 bp, Homo Sapiens
gaaagctcacaagaactgcta

SEQ ID NO: 65740 - DNA, 22 bp, Homo Sapiens
gaaagctcacaagaactgctaa

SEQ ID NO: 65741 - DNA, 23 bp, Homo Sapiens
gaaagctcacaagaactgctaac

SEQ ID NO: 65742 - DNA, 24 bp, Homo Sapiens
gaaagctcacaagaactgctaact

SEQ ID NO: 65743 - DNA, 25 bp, Homo Sapiens
gaaagctcacaagaactgctaactc

SEQ ID NO: 65744 - DNA, 16 bp, Homo Sapiens
gaaaggttggtggttc

SEQ ID NO: 65745 - DNA, 21 bp, Homo Sapiens
gaaatacaacgatggtttttc

SEQ ID NO: 65746 - DNA, 16 bp, Homo Sapiens
gaaatttaggttaaat

SEQ ID NO: 65747 - DNA, 17 bp, Homo Sapiens
gaactgctaactcatgc

SEQ ID NO: 65748 - DNA, 18 bp, Homo Sapiens
gaactgctaactcatgcc

SEQ ID NO: 65749 - DNA, 16 bp, Homo Sapiens
gaagattgagggttcg

SEQ ID NO: 65750 - DNA, 19 bp, Homo Sapiens
gaagcagcttcaaacctgc

SEQ ID NO: 65751 - DNA, 16 bp, Homo Sapiens
gaagcattggactgta

SEQ ID NO: 65752 - DNA, 19 bp, Homo Sapiens
gaatccagcgatccgagtt

SEQ ID NO: 65753 - DNA, 20 bp, Homo Sapiens
gaatccagcgatccgagttc

SEQ ID NO: 65754 - DNA, 19 bp, Homo Sapiens
gaatcccagcggtgcctcc

SEQ ID NO: 65755 - DNA, 20 bp, Homo Sapiens
gaatcccatcctcgtcgcca

SEQ ID NO: 65756 - DNA, 17 bp, Homo Sapiens
gaatccgagtcacggca

SEQ ID NO: 65757 - DNA, 19 bp, Homo Sapiens
gaatccgagtcacggcacc

SEQ ID NO: 65758 - DNA, 20 bp, Homo Sapiens
gaatccgagtcacggcacca

SEQ ID NO: 65759 - DNA, 20 bp, Homo Sapiens
gaatccggctcgaaggacca

SEQ ID NO: 65760 - DNA, 17 bp, Homo Sapiens
gaatctgacaacagagg

SEQ ID NO: 65761 - DNA, 18 bp, Homo Sapiens
gaatctgacaacagaggc

SEQ ID NO: 65762 - DNA, 19 bp, Homo Sapiens
gaatctgacaacagaggct

SEQ ID NO: 65763 - DNA, 20 bp, Homo Sapiens
gaatctgacaacagaggctt

SEQ ID NO: 65764 - DNA, 21 bp, Homo Sapiens
gaatctgacaacagaggctta

SEQ ID NO: 65765 - DNA, 24 bp, Homo Sapiens
gaatctgacaacagaggcttacga

SEQ ID NO: 65766 - DNA, 16 bp, Homo Sapiens
gaatgatttcgactca

SEQ ID NO: 65767 - DNA, 17 bp, Homo Sapiens
gaatgatttcgactcat

SEQ ID NO: 65768 - DNA, 18 bp, Homo Sapiens
gaccacgtggcctaatgg

SEQ ID NO: 65769 - DNA, 19 bp, Homo Sapiens
gaccacgtggcctaatgga

SEQ ID NO: 65770 - DNA, 18 bp, Homo Sapiens
gacccagtggcctaatgg

SEQ ID NO: 65771 - DNA, 19 bp, Homo Sapiens
gacccagtggcctaatgga

SEQ ID NO: 65772 - DNA, 16 bp, Homo Sapiens
gaccccttatttaccc

SEQ ID NO: 65773 - DNA, 17 bp, Homo Sapiens
gaccccttatttacccc

SEQ ID NO: 65774 - DNA, 18 bp, Homo Sapiens
gaccccttatttacccca

SEQ ID NO: 65775 - DNA, 18 bp, Homo Sapiens
gaccgcgtggcctaatgg

SEQ ID NO: 65776 - DNA, 19 bp, Homo Sapiens
gaccgcgtggcctaatgga

SEQ ID NO: 65777 - DNA, 18 bp, Homo Sapiens
gacctcgtggcgcaacgg

SEQ ID NO: 65778 - DNA, 19 bp, Homo Sapiens
gacctcgtggcgcaacggt

SEQ ID NO: 65779 - DNA, 18 bp, Homo Sapiens
gacctcgtggcgcaatgg

SEQ ID NO: 65780 - DNA, 19 bp, Homo Sapiens
gacctcgtggcgcaatggt

SEQ ID NO: 65781 - DNA, 16 bp, Homo Sapiens
gacgaggtggccgagt

SEQ ID NO: 65782 - DNA, 18 bp, Homo Sapiens
gacgaggtggccgagtgg

SEQ ID NO: 65783 - DNA, 19 bp, Homo Sapiens
gacgaggtggccgagtggt

SEQ ID NO: 65784 - DNA, 23 bp, Homo Sapiens
gacgaggtggccgagtggttaag

SEQ ID NO: 65785 - DNA, 25 bp, Homo Sapiens
gacgaggtggccgagtggttaaggc

SEQ ID NO: 65786 - DNA, 17 bp, Homo Sapiens
gacgggctcacatcacc

SEQ ID NO: 65787 - DNA, 22 bp, Homo Sapiens
gactcaagttctggtctccgga

SEQ ID NO: 65788 - DNA, 18 bp, Homo Sapiens
gactcccggtgtgggaac

SEQ ID NO: 65789 - DNA, 19 bp, Homo Sapiens
gactcccggtgtgggaacc

SEQ ID NO: 65790 - DNA, 20 bp, Homo Sapiens
gactcccggtgtgggaacca

SEQ ID NO: 65791 - DNA, 16 bp, Homo Sapiens
gactttttctctgacc

SEQ ID NO: 65792 - DNA, 17 bp, Homo Sapiens
gactttttctctgacca

SEQ ID NO: 65793 - DNA, 16 bp, Homo Sapiens
gagaaagctcacaaga

SEQ ID NO: 65794 - DNA, 17 bp, Homo Sapiens
gagaaagctcacaagaa

SEQ ID NO: 65795 - DNA, 18 bp, Homo Sapiens
gagaaagctcacaagaac

SEQ ID NO: 65796 - DNA, 19 bp, Homo Sapiens
gagaaagctcacaagaact

SEQ ID NO: 65797 - DNA, 20 bp, Homo Sapiens
gagaaagctcacaagaactg

SEQ ID NO: 65798 - DNA, 21 bp, Homo Sapiens
gagaaagctcacaagaactgc

SEQ ID NO: 65799 - DNA, 22 bp, Homo Sapiens
gagaaagctcacaagaactgct

SEQ ID NO: 65800 - DNA, 23 bp, Homo Sapiens
gagaaagctcacaagaactgcta

SEQ ID NO: 65801 - DNA, 24 bp, Homo Sapiens
gagaaagctcacaagaactgctaa

SEQ ID NO: 65802 - DNA, 25 bp, Homo Sapiens
gagaaagctcacaagaactgctaac

SEQ ID NO: 65803 - DNA, 18 bp, Homo Sapiens
gagaatagtttaaattag

SEQ ID NO: 65804 - DNA, 16 bp, Homo Sapiens
gagaggtcccgggttc

SEQ ID NO: 65805 - DNA, 19 bp, Homo Sapiens
gagatgaaaacctttttcc

SEQ ID NO: 65806 - DNA, 20 bp, Homo Sapiens
gagcccacccagggacgcca

SEQ ID NO: 65807 - DNA, 18 bp, Homo Sapiens
gagcccggtaatcgcata

SEQ ID NO: 65808 - DNA, 25 bp, Homo Sapiens
gagcttaaacccccttatttctacc

SEQ ID NO: 65809 - DNA, 18 bp, Homo Sapiens
gaggtgattttcatattg

SEQ ID NO: 65810 - DNA, 24 bp, Homo Sapiens
gaggttccgggttcgagtcccggc

SEQ ID NO: 65811 - DNA, 19 bp, Homo Sapiens
gagtaaataataggagctt

SEQ ID NO: 65812 - DNA, 21 bp, Homo Sapiens
gagtaaataataggagcttaa

SEQ ID NO: 65813 - DNA, 16 bp, Homo Sapiens
gagtatccccgcctgt

SEQ ID NO: 65814 - DNA, 16 bp, Homo Sapiens
gagtgaagcattggac

SEQ ID NO: 65815 - DNA, 17 bp, Homo Sapiens
gagtgaagcattggact

SEQ ID NO: 65816 - DNA, 18 bp, Homo Sapiens
gagtgaagcattggactg

SEQ ID NO: 65817 - DNA, 19 bp, Homo Sapiens
gagtgaagcattggactgt

SEQ ID NO: 65818 - DNA, 20 bp, Homo Sapiens
gagtgaagcattggactgta

SEQ ID NO: 65819 - DNA, 18 bp, Homo Sapiens
gagtggggttttgcagtc

SEQ ID NO: 65820 - DNA, 16 bp, Homo Sapiens
gagtgtagcttaacac

SEQ ID NO: 65821 - DNA, 17 bp, Homo Sapiens
gagtgtagcttaacaca

SEQ ID NO: 65822 - DNA, 22 bp, Homo Sapiens
gagttaaagactttttctctga

SEQ ID NO: 65823 - DNA, 23 bp, Homo Sapiens
gagttaaagactttttctctgac

SEQ ID NO: 65824 - DNA, 24 bp, Homo Sapiens
gagttaaagactttttctctgacc

SEQ ID NO: 65825 - DNA, 19 bp, Homo Sapiens
gagttcaaatctcggtgga

SEQ ID NO: 65826 - DNA, 20 bp, Homo Sapiens
gagttcaaatctcggtggaa

SEQ ID NO: 65827 - DNA, 21 bp, Homo Sapiens
gagttcaaatctcggtggaac

SEQ ID NO: 65828 - DNA, 22 bp, Homo Sapiens
gagttcaaatctcggtggaacc

SEQ ID NO: 65829 - DNA, 23 bp, Homo Sapiens
gagttcaaatctcggtggaacct

SEQ ID NO: 65830 - DNA, 24 bp, Homo Sapiens
gagttcaaatctcggtggaacctc

SEQ ID NO: 65831 - DNA, 25 bp, Homo Sapiens
gagttcaaatctcggtggaacctcc

SEQ ID NO: 65832 - DNA, 20 bp, Homo Sapiens
gagttcaaatctcggtggga

SEQ ID NO: 65833 - DNA, 21 bp, Homo Sapiens
gagttcaaatctcggtgggac

SEQ ID NO: 65834 - DNA, 22 bp, Homo Sapiens
gagttcaaatctcggtgggacc

SEQ ID NO: 65835 - DNA, 23 bp, Homo Sapiens
gagttcaaatctcggtgggacct

SEQ ID NO: 65836 - DNA, 21 bp, Homo Sapiens
gagttcgaatctcggtgggac

SEQ ID NO: 65837 - DNA, 22 bp, Homo Sapiens
gagttcgaatctcggtgggacc

SEQ ID NO: 65838 - DNA, 20 bp, Homo Sapiens
gagttcgagtctcggtggaa

SEQ ID NO: 65839 - DNA, 21 bp, Homo Sapiens
gagttcgagtctcggtggaac

SEQ ID NO: 65840 - DNA, 23 bp, Homo Sapiens
gagttcgagtctcggtggaacct

SEQ ID NO: 65841 - DNA, 21 bp, Homo Sapiens
gataacagctatccattggtc

SEQ ID NO: 65842 - DNA, 19 bp, Homo Sapiens
gataatcatatttaccaac

SEQ ID NO: 65843 - DNA, 20 bp, Homo Sapiens
gataatcatatttaccaacc

SEQ ID NO: 65844 - DNA, 21 bp, Homo Sapiens
gataatcatatttaccaacca

SEQ ID NO: 65845 - DNA, 19 bp, Homo Sapiens
gatagagtaaataatagga

SEQ ID NO: 65846 - DNA, 20 bp, Homo Sapiens
gatccccggcatctccacca

SEQ ID NO: 65847 - DNA, 17 bp, Homo Sapiens
gatggccgagcggtcta

SEQ ID NO: 65848 - DNA, 20 bp, Homo Sapiens
gatggggtgtgataggtggc

SEQ ID NO: 65849 - DNA, 16 bp, Homo Sapiens
gattaagagaaccaac

SEQ ID NO: 65850 - DNA, 17 bp, Homo Sapiens
gattaagagaaccaaca

SEQ ID NO: 65851 - DNA, 20 bp, Homo Sapiens
gattcccggccaacgcacca

SEQ ID NO: 65852 - DNA, 20 bp, Homo Sapiens
gattcccgggcggcgcacca

SEQ ID NO: 65853 - DNA, 17 bp, Homo Sapiens
gattccggatcagaaga

SEQ ID NO: 65854 - DNA, 19 bp, Homo Sapiens
gattccggctcgaaggacc

SEQ ID NO: 65855 - DNA, 20 bp, Homo Sapiens
gattccggctcgaaggacca

SEQ ID NO: 65856 - DNA, 19 bp, Homo Sapiens
gattctcatagtcctagcc

SEQ ID NO: 65857 - DNA, 20 bp, Homo Sapiens
gattctcatagtcctagcca

SEQ ID NO: 65858 - DNA, 19 bp, Homo Sapiens
gattgagggttcgagtccc

SEQ ID NO: 65859 - DNA, 20 bp, Homo Sapiens
gattgagggttcgagtccct

SEQ ID NO: 65860 - DNA, 22 bp, Homo Sapiens
gattgagggttcgagtcccttc

SEQ ID NO: 65861 - DNA, 23 bp, Homo Sapiens
gattgagggttcgagtcccttcg

SEQ ID NO: 65862 - DNA, 16 bp, Homo Sapiens
gattgtgaatctgaca

SEQ ID NO: 65863 - DNA, 17 bp, Homo Sapiens
gattgtgaatctgacaa

SEQ ID NO: 65864 - DNA, 18 bp, Homo Sapiens
gattgtgaatctgacaac

SEQ ID NO: 65865 - DNA, 19 bp, Homo Sapiens
gattgtgaatctgacaaca

SEQ ID NO: 65866 - DNA, 20 bp, Homo Sapiens
gattgtgaatctgacaacag

SEQ ID NO: 65867 - DNA, 21 bp, Homo Sapiens
gattgtgaatctgacaacaga

SEQ ID NO: 65868 - DNA, 22 bp, Homo Sapiens
gattgtgaatctgacaacagag

SEQ ID NO: 65869 - DNA, 20 bp, Homo Sapiens
gatttcaacttaacttgacc

SEQ ID NO: 65870 - DNA, 25 bp, Homo Sapiens
gatttcaacttaacttgaccgctct

SEQ ID NO: 65871 - DNA, 18 bp, Homo Sapiens
gatttcgactcattaaat

SEQ ID NO: 65872 - DNA, 19 bp, Homo Sapiens
gatttcgactcattaaatt

SEQ ID NO: 65873 - DNA, 20 bp, Homo Sapiens
gcaactccaaataaaagtac

SEQ ID NO: 65874 - DNA, 21 bp, Homo Sapiens
gcaactccaaataaaagtacc

SEQ ID NO: 65875 - DNA, 19 bp, Homo Sapiens
gcaatacttaatttctgcc

SEQ ID NO: 65876 - DNA, 20 bp, Homo Sapiens
gcaatacttaatttctgcca

SEQ ID NO: 65877 - DNA, 19 bp, Homo Sapiens
gcaatggatagcgcattgg

SEQ ID NO: 65878 - DNA, 18 bp, Homo Sapiens
gcacccaacttacactta

SEQ ID NO: 65879 - DNA, 23 bp, Homo Sapiens
gcacccaacttacacttaggaga

SEQ ID NO: 65880 - DNA, 19 bp, Homo Sapiens
gcactctggactctgaatc

SEQ ID NO: 65881 - DNA, 20 bp, Homo Sapiens
gcactctggactctgaatcc

SEQ ID NO: 65882 - DNA, 21 bp, Homo Sapiens
gcactctggactctgaatcca

SEQ ID NO: 65883 - DNA, 17 bp, Homo Sapiens
gcagagcccggtaatcg

SEQ ID NO: 65884 - DNA, 18 bp, Homo Sapiens
gcagcgatggccgagtgg

SEQ ID NO: 65885 - DNA, 19 bp, Homo Sapiens
gcataaaacttaaaacttt

SEQ ID NO: 65886 - DNA, 16 bp, Homo Sapiens
gcatgagactcttaat

SEQ ID NO: 65887 - DNA, 17 bp, Homo Sapiens
gcatgagactcttaatc

SEQ ID NO: 65888 - DNA, 18 bp, Homo Sapiens
gcatgagactcttaatct

SEQ ID NO: 65889 - DNA, 19 bp, Homo Sapiens
gcatgagactcttaatctc

SEQ ID NO: 65890 - DNA, 16 bp, Homo Sapiens
gcatgggactcttaat

SEQ ID NO: 65891 - DNA, 17 bp, Homo Sapiens
gcatgggactcttaatc

SEQ ID NO: 65892 - DNA, 18 bp, Homo Sapiens
gcatgggactcttaatcc

SEQ ID NO: 65893 - DNA, 19 bp, Homo Sapiens
gcatgggactcttaatccc

SEQ ID NO: 65894 - DNA, 18 bp, Homo Sapiens
gcatgggtggttcagtgg

SEQ ID NO: 65895 - DNA, 17 bp, Homo Sapiens
gcattaaccttttaagt

SEQ ID NO: 65896 - DNA, 19 bp, Homo Sapiens
gcattaaccttttaagtta

SEQ ID NO: 65897 - DNA, 16 bp, Homo Sapiens
gcattggtggttcagt

SEQ ID NO: 65898 - DNA, 17 bp, Homo Sapiens
gcattggtggttcagtg

SEQ ID NO: 65899 - DNA, 18 bp, Homo Sapiens
gcattggtggttcagtgg

SEQ ID NO: 65900 - DNA, 19 bp, Homo Sapiens
gcattggtggttcagtggt

SEQ ID NO: 65901 - DNA, 20 bp, Homo Sapiens
gcattggtggttcagtggta

SEQ ID NO: 65902 - DNA, 21 bp, Homo Sapiens
gcattggtggttcagtggtag

SEQ ID NO: 65903 - DNA, 22 bp, Homo Sapiens
gcattggtggttcagtggtaga

SEQ ID NO: 65904 - DNA, 23 bp, Homo Sapiens
gcattggtggttcagtggtagaa

SEQ ID NO: 65905 - DNA, 24 bp, Homo Sapiens
gcattggtggttcagtggtagaat

SEQ ID NO: 65906 - DNA, 25 bp, Homo Sapiens
gcattggtggttcagtggtagaatt

SEQ ID NO: 65907 - DNA, 18 bp, Homo Sapiens
gccagggattgtgggttc

SEQ ID NO: 65908 - DNA, 17 bp, Homo Sapiens
gccagtggcgcaatgga

SEQ ID NO: 65909 - DNA, 17 bp, Homo Sapiens
gcccacccagggacgcc

SEQ ID NO: 65910 - DNA, 18 bp, Homo Sapiens
gcccacccagggacgcca

SEQ ID NO: 65911 - DNA, 18 bp, Homo Sapiens
gccccagtggaaccacca

SEQ ID NO: 65912 - DNA, 18 bp, Homo Sapiens
gccccagtggcctaatgg

SEQ ID NO: 65913 - DNA, 19 bp, Homo Sapiens
gccccagtggcctaatgga

SEQ ID NO: 65914 - DNA, 18 bp, Homo Sapiens
gcccccatgtctaacaac

SEQ ID NO: 65915 - DNA, 19 bp, Homo Sapiens
gcccccatgtctaacaaca

SEQ ID NO: 65916 - DNA, 23 bp, Homo Sapiens
gcccccatgtctaacaacatggc

SEQ ID NO: 65917 - DNA, 24 bp, Homo Sapiens
gcccccatgtctaacaacatggct

SEQ ID NO: 65918 - DNA, 25 bp, Homo Sapiens
gcccccatgtctaacaacatggctt

SEQ ID NO: 65919 - DNA, 19 bp, Homo Sapiens
gccccggtggcctaatgga

SEQ ID NO: 65920 - DNA, 17 bp, Homo Sapiens
gcccgcatcctccacca

SEQ ID NO: 65921 - DNA, 16 bp, Homo Sapiens
gcccggatagctcagt

SEQ ID NO: 65922 - DNA, 17 bp, Homo Sapiens
gcccggatagctcagtc

SEQ ID NO: 65923 - DNA, 18 bp, Homo Sapiens
gcccggatagctcagtcg

SEQ ID NO: 65924 - DNA, 19 bp, Homo Sapiens
gcccggatagctcagtcgg

SEQ ID NO: 65925 - DNA, 20 bp, Homo Sapiens
gcccggatagctcagtcggt

SEQ ID NO: 65926 - DNA, 21 bp, Homo Sapiens
gcccggatagctcagtcggta

SEQ ID NO: 65927 - DNA, 22 bp, Homo Sapiens
gcccggatagctcagtcggtag

SEQ ID NO: 65928 - DNA, 23 bp, Homo Sapiens
gcccggatagctcagtcggtaga

SEQ ID NO: 65929 - DNA, 25 bp, Homo Sapiens
gcccggatagctcagtcggtagagc

SEQ ID NO: 65930 - DNA, 16 bp, Homo Sapiens
gcccggctagctcagt

SEQ ID NO: 65931 - DNA, 17 bp, Homo Sapiens
gcccggctagctcagtc

SEQ ID NO: 65932 - DNA, 18 bp, Homo Sapiens
gcccggctagctcagtcg

SEQ ID NO: 65933 - DNA, 19 bp, Homo Sapiens
gcccggctagctcagtcgg

SEQ ID NO: 65934 - DNA, 20 bp, Homo Sapiens
gcccggctagctcagtcggt

SEQ ID NO: 65935 - DNA, 23 bp, Homo Sapiens
gcccggctagctcagtcggtaga

SEQ ID NO: 65936 - DNA, 19 bp, Homo Sapiens
gccgaaatagctcagttgg

SEQ ID NO: 65937 - DNA, 20 bp, Homo Sapiens
gccgaaatagctcagttggg

SEQ ID NO: 65938 - DNA, 17 bp, Homo Sapiens
gccgaggttgtgagttc

SEQ ID NO: 65939 - DNA, 18 bp, Homo Sapiens
gccgcgtggcctaatgga

SEQ ID NO: 65940 - DNA, 25 bp, Homo Sapiens
gccgctggtgtagtggtatcatgca

SEQ ID NO: 65941 - DNA, 18 bp, Homo Sapiens
gccgtgatcgtatagtgg

SEQ ID NO: 65942 - DNA, 19 bp, Homo Sapiens
gccgtgatcgtatagtggt

SEQ ID NO: 65943 - DNA, 19 bp, Homo Sapiens
gcctccttagcgcagtagg

SEQ ID NO: 65944 - DNA, 19 bp, Homo Sapiens
gcctcgttagcgcagtagg

SEQ ID NO: 65945 - DNA, 19 bp, Homo Sapiens
gcctggatagctcagtcgg

SEQ ID NO: 65946 - DNA, 19 bp, Homo Sapiens
gcctggatagctcagttgg

SEQ ID NO: 65947 - DNA, 20 bp, Homo Sapiens
gcctggatagctcagttggt

SEQ ID NO: 65948 - DNA, 19 bp, Homo Sapiens
gcctgggtagctcagtcgg

SEQ ID NO: 65949 - DNA, 16 bp, Homo Sapiens
gcgaaaggtccccggt

SEQ ID NO: 65950 - DNA, 24 bp, Homo Sapiens
gcgacccgggttcgattcccgggc

SEQ ID NO: 65951 - DNA, 16 bp, Homo Sapiens
gcgccgctggtgtagt

SEQ ID NO: 65952 - DNA, 17 bp, Homo Sapiens
gcgccgctggtgtagtg

SEQ ID NO: 65953 - DNA, 18 bp, Homo Sapiens
gcgccgctggtgtagtgg

SEQ ID NO: 65954 - DNA, 19 bp, Homo Sapiens
gcgccgctggtgtagtggt

SEQ ID NO: 65955 - DNA, 20 bp, Homo Sapiens
gcgccgctggtgtagtggta

SEQ ID NO: 65956 - DNA, 21 bp, Homo Sapiens
gcgccgctggtgtagtggtat

SEQ ID NO: 65957 - DNA, 22 bp, Homo Sapiens
gcgccgctggtgtagtggtatc

SEQ ID NO: 65958 - DNA, 22 bp, Homo Sapiens
gcggttaggattcctggttttc

SEQ ID NO: 65959 - DNA, 20 bp, Homo Sapiens
gcgttcaggtcgcagtctcc

SEQ ID NO: 65960 - DNA, 21 bp, Homo Sapiens
gcgttcaggtcgcagtctccc

SEQ ID NO: 65961 - DNA, 16 bp, Homo Sapiens
gcgttggtggtatagt

SEQ ID NO: 65962 - DNA, 18 bp, Homo Sapiens
gcgttggtggtatagtgg

SEQ ID NO: 65963 - DNA, 19 bp, Homo Sapiens
gcgttggtggtatagtggt

SEQ ID NO: 65964 - DNA, 17 bp, Homo Sapiens
gctaaataagctatcgg

SEQ ID NO: 65965 - DNA, 18 bp, Homo Sapiens
gctaaataagctatcggg

SEQ ID NO: 65966 - DNA, 21 bp, Homo Sapiens
gctaaataagctatcgggccc

SEQ ID NO: 65967 - DNA, 17 bp, Homo Sapiens
gctaaatcctatatatc

SEQ ID NO: 65968 - DNA, 17 bp, Homo Sapiens
gctaatggtggagttaa

SEQ ID NO: 65969 - DNA, 21 bp, Homo Sapiens
gctaatggtggagttaaagac

SEQ ID NO: 65970 - DNA, 18 bp, Homo Sapiens
gctagctcagtcggtaga

SEQ ID NO: 65971 - DNA, 20 bp, Homo Sapiens
gctagctcagtcggtagagc

SEQ ID NO: 65972 - DNA, 19 bp, Homo Sapiens
gctaggattcggcgctttc

SEQ ID NO: 65973 - DNA, 16 bp, Homo Sapiens
gctatcgggcccatac

SEQ ID NO: 65974 - DNA, 17 bp, Homo Sapiens
gctatcgggcccatacc

SEQ ID NO: 65975 - DNA, 18 bp, Homo Sapiens
gctatcgggcccataccc

SEQ ID NO: 65976 - DNA, 19 bp, Homo Sapiens
gctatcgggcccatacccc

SEQ ID NO: 65977 - DNA, 21 bp, Homo Sapiens
gctatcgggcccataccccga

SEQ ID NO: 65978 - DNA, 22 bp, Homo Sapiens
gctatcgggcccataccccgaa

SEQ ID NO: 65979 - DNA, 23 bp, Homo Sapiens
gctatcgggcccataccccgaaa

SEQ ID NO: 65980 - DNA, 16 bp, Homo Sapiens
gctcacaagaactgct

SEQ ID NO: 65981 - DNA, 17 bp, Homo Sapiens
gctcacaagaactgcta

SEQ ID NO: 65982 - DNA, 18 bp, Homo Sapiens
gctcacaagaactgctaa

SEQ ID NO: 65983 - DNA, 19 bp, Homo Sapiens
gctcacaagaactgctaac

SEQ ID NO: 65984 - DNA, 20 bp, Homo Sapiens
gctcacaagaactgctaact

SEQ ID NO: 65985 - DNA, 21 bp, Homo Sapiens
gctcacaagaactgctaactc

SEQ ID NO: 65986 - DNA, 22 bp, Homo Sapiens
gctcacaagaactgctaactca

SEQ ID NO: 65987 - DNA, 18 bp, Homo Sapiens
gctcacatcaccccataa

SEQ ID NO: 65988 - DNA, 21 bp, Homo Sapiens
gctcacatcaccccataaaca

SEQ ID NO: 65989 - DNA, 24 bp, Homo Sapiens
gctcacatcaccccataaacacca

SEQ ID NO: 65990 - DNA, 23 bp, Homo Sapiens
gctcagtcggtagagcatgggac

SEQ ID NO: 65991 - DNA, 20 bp, Homo Sapiens
gctccagtctcttcgggggc

SEQ ID NO: 65992 - DNA, 18 bp, Homo Sapiens
gctccagtggcgcaatcg

SEQ ID NO: 65993 - DNA, 19 bp, Homo Sapiens
gctccagtggcgcaatcgg

SEQ ID NO: 65994 - DNA, 20 bp, Homo Sapiens
gctccagtggcgcaatcggt

SEQ ID NO: 65995 - DNA, 17 bp, Homo Sapiens
gctccgaggtgattttc

SEQ ID NO: 65996 - DNA, 18 bp, Homo Sapiens
gctccgaggtgattttca

SEQ ID NO: 65997 - DNA, 23 bp, Homo Sapiens
gctccgaggtgattttcatattg

SEQ ID NO: 65998 - DNA, 18 bp, Homo Sapiens
gctccgtggcgcaatgga

SEQ ID NO: 65999 - DNA, 19 bp, Homo Sapiens
gctgagtgaagcattggac

SEQ ID NO: 66000 - DNA, 22 bp, Homo Sapiens
gctgagtgaagcattggactgt

SEQ ID NO: 66001 - DNA, 23 bp, Homo Sapiens
gctgagtgaagcattggactgta

SEQ ID NO: 66002 - DNA, 16 bp, Homo Sapiens
gctggtgtagtggtat

SEQ ID NO: 66003 - DNA, 17 bp, Homo Sapiens
gctggtgtagtggtatc

SEQ ID NO: 66004 - DNA, 18 bp, Homo Sapiens
gctggtgtagtggtatca

SEQ ID NO: 66005 - DNA, 19 bp, Homo Sapiens
gctggtgtagtggtatcat

SEQ ID NO: 66006 - DNA, 20 bp, Homo Sapiens
gctggtgtagtggtatcatg

SEQ ID NO: 66007 - DNA, 21 bp, Homo Sapiens
gctggtgtagtggtatcatgc

SEQ ID NO: 66008 - DNA, 24 bp, Homo Sapiens
gctggtgtagtggtatcatgcaag

SEQ ID NO: 66009 - DNA, 25 bp, Homo Sapiens
gctggtgtagtggtatcatgcaaga

SEQ ID NO: 66010 - DNA, 18 bp, Homo Sapiens
gctgtgatggccgagtgg

SEQ ID NO: 66011 - DNA, 19 bp, Homo Sapiens
gctgtgatggccgagtggt

SEQ ID NO: 66012 - DNA, 23 bp, Homo Sapiens
gctgtgatggccgagtggttaag

SEQ ID NO: 66013 - DNA, 16 bp, Homo Sapiens
gcttaaacccccttat

SEQ ID NO: 66014 - DNA, 17 bp, Homo Sapiens
gcttaaacccccttatt

SEQ ID NO: 66015 - DNA, 20 bp, Homo Sapiens
gcttaaacccccttatttct

SEQ ID NO: 66016 - DNA, 21 bp, Homo Sapiens
gcttaaacccccttatttcta

SEQ ID NO: 66017 - DNA, 22 bp, Homo Sapiens
gcttaaacccccttatttctac

SEQ ID NO: 66018 - DNA, 23 bp, Homo Sapiens
gcttaaacccccttatttctacc

SEQ ID NO: 66019 - DNA, 24 bp, Homo Sapiens
gcttaaacccccttatttctacca

SEQ ID NO: 66020 - DNA, 23 bp, Homo Sapiens
gcttacgaccccttatttacccc

SEQ ID NO: 66021 - DNA, 17 bp, Homo Sapiens
gcttcaaacctgccggg

SEQ ID NO: 66022 - DNA, 19 bp, Homo Sapiens
gcttcaaacctgccggggc

SEQ ID NO: 66023 - DNA, 21 bp, Homo Sapiens
gcttcaaacctgccggggctt

SEQ ID NO: 66024 - DNA, 22 bp, Homo Sapiens
gcttcaaacctgccggggcttc

SEQ ID NO: 66025 - DNA, 23 bp, Homo Sapiens
gcttcaaacctgccggggcttcc

SEQ ID NO: 66026 - DNA, 19 bp, Homo Sapiens
gcttctgtagtgtagtggt

SEQ ID NO: 66027 - DNA, 17 bp, Homo Sapiens
gctttgcacgcgtgggt

SEQ ID NO: 66028 - DNA, 17 bp, Homo Sapiens
ggaagcgtgctgggccc

SEQ ID NO: 66029 - DNA, 20 bp, Homo Sapiens
ggagatgaaaacctttttcc

SEQ ID NO: 66030 - DNA, 24 bp, Homo Sapiens
ggagttaaagactttttctctgac

SEQ ID NO: 66031 - DNA, 25 bp, Homo Sapiens
ggagttaaagactttttctctgacc

SEQ ID NO: 66032 - DNA, 19 bp, Homo Sapiens
ggatagctcagtcggtaga

SEQ ID NO: 66033 - DNA, 24 bp, Homo Sapiens
ggatagctcagtcggtagagcatc

SEQ ID NO: 66034 - DNA, 22 bp, Homo Sapiens
ggatcagaagattgagggttcg

SEQ ID NO: 66035 - DNA, 16 bp, Homo Sapiens
ggatggaggcgtgggt

SEQ ID NO: 66036 - DNA, 17 bp, Homo Sapiens
ggatggaggcgtgggtt

SEQ ID NO: 66037 - DNA, 18 bp, Homo Sapiens
ggatggccgagtggtcta

SEQ ID NO: 66038 - DNA, 18 bp, Homo Sapiens
ggccagtggcgcaatgga

SEQ ID NO: 66039 - DNA, 19 bp, Homo Sapiens
ggccccatggtgtaatggt

SEQ ID NO: 66040 - DNA, 18 bp, Homo Sapiens
ggccctatagctcagggg

SEQ ID NO: 66041 - DNA, 19 bp, Homo Sapiens
ggccctatagctcaggggt

SEQ ID NO: 66042 - DNA, 19 bp, Homo Sapiens
ggccgcgtggcctaatgga

SEQ ID NO: 66043 - DNA, 16 bp, Homo Sapiens
ggccggttagctcagt

SEQ ID NO: 66044 - DNA, 20 bp, Homo Sapiens
ggccggttagctcagtcggc

SEQ ID NO: 66045 - DNA, 18 bp, Homo Sapiens
ggccggttagctcagttg

SEQ ID NO: 66046 - DNA, 19 bp, Homo Sapiens
ggccggttagctcagttgg

SEQ ID NO: 66047 - DNA, 20 bp, Homo Sapiens
ggccggttagctcagttggt

SEQ ID NO: 66048 - DNA, 21 bp, Homo Sapiens
ggccggttagctcagttggtt

SEQ ID NO: 66049 - DNA, 19 bp, Homo Sapiens
ggccgtgatcgtatagtgg

SEQ ID NO: 66050 - DNA, 20 bp, Homo Sapiens
ggccgtgatcgtatagtggt

SEQ ID NO: 66051 - DNA, 21 bp, Homo Sapiens
ggccgtgatcgtatagtggtt

SEQ ID NO: 66052 - DNA, 22 bp, Homo Sapiens
ggccgtgatcgtatagtggtta

SEQ ID NO: 66053 - DNA, 24 bp, Homo Sapiens
ggccgtgatcgtatagtggttagt

SEQ ID NO: 66054 - DNA, 18 bp, Homo Sapiens
ggcctcgtggcgcaacgg

SEQ ID NO: 66055 - DNA, 18 bp, Homo Sapiens
ggcgcggtggccaagtgg

SEQ ID NO: 66056 - DNA, 17 bp, Homo Sapiens
ggctagctcagtcggta

SEQ ID NO: 66057 - DNA, 19 bp, Homo Sapiens
ggctagctcagtcggtaga

SEQ ID NO: 66058 - DNA, 19 bp, Homo Sapiens
ggctcacatcaccccataa

SEQ ID NO: 66059 - DNA, 25 bp, Homo Sapiens
ggctcacatcaccccataaacacca

SEQ ID NO: 66060 - DNA, 17 bp, Homo Sapiens
ggctccatagctcaggg

SEQ ID NO: 66061 - DNA, 18 bp, Homo Sapiens
ggctccatagctcagggg

SEQ ID NO: 66062 - DNA, 19 bp, Homo Sapiens
ggctccatagctcaggggt

SEQ ID NO: 66063 - DNA, 19 bp, Homo Sapiens
ggctccatagctcagtggt

SEQ ID NO: 66064 - DNA, 18 bp, Homo Sapiens
ggctccgtggcgcaatgg

SEQ ID NO: 66065 - DNA, 19 bp, Homo Sapiens
ggctccgtggcgcaatgga

SEQ ID NO: 66066 - DNA, 18 bp, Homo Sapiens
ggctcgttggtctagggg

SEQ ID NO: 66067 - DNA, 20 bp, Homo Sapiens
ggctcgttggtctaggggta

SEQ ID NO: 66068 - DNA, 18 bp, Homo Sapiens
ggctctgtggcgcaatgg

SEQ ID NO: 66069 - DNA, 19 bp, Homo Sapiens
ggctctgtggcgcaatgga

SEQ ID NO: 66070 - DNA, 20 bp, Homo Sapiens
ggctctgtggcttagttggc

SEQ ID NO: 66071 - DNA, 20 bp, Homo Sapiens
ggctgagtgaagcattggac

SEQ ID NO: 66072 - DNA, 20 bp, Homo Sapiens
gggattgtgggttcgagtcc

SEQ ID NO: 66073 - DNA, 21 bp, Homo Sapiens
gggattgtgggttcgagtccc

SEQ ID NO: 66074 - DNA, 18 bp, Homo Sapiens
gggccagtggcgcaatgg

SEQ ID NO: 66075 - DNA, 19 bp, Homo Sapiens
gggccagtggcgcaatgga

SEQ ID NO: 66076 - DNA, 20 bp, Homo Sapiens
gggccagtggcgcaatggat

SEQ ID NO: 66077 - DNA, 19 bp, Homo Sapiens
gggccagtggctcaatgga

SEQ ID NO: 66078 - DNA, 16 bp, Homo Sapiens
ggggaattagctcaaa

SEQ ID NO: 66079 - DNA, 19 bp, Homo Sapiens
ggggaattagctcaaatgg

SEQ ID NO: 66080 - DNA, 20 bp, Homo Sapiens
ggggaattagctcaaatggt

SEQ ID NO: 66081 - DNA, 21 bp, Homo Sapiens
ggggaattagctcaaatggta

SEQ ID NO: 66082 - DNA, 16 bp, Homo Sapiens
ggggatgtagctcagt

SEQ ID NO: 66083 - DNA, 17 bp, Homo Sapiens
ggggatgtagctcagtg

SEQ ID NO: 66084 - DNA, 18 bp, Homo Sapiens
ggggatgtagctcagtgg

SEQ ID NO: 66085 - DNA, 19 bp, Homo Sapiens
ggggatgtagctcagtggt

SEQ ID NO: 66086 - DNA, 20 bp, Homo Sapiens
ggggatgtagctcagtggta

SEQ ID NO: 66087 - DNA, 21 bp, Homo Sapiens
ggggatgtagctcagtggtag

SEQ ID NO: 66088 - DNA, 22 bp, Homo Sapiens
ggggatgtagctcagtggtaga

SEQ ID NO: 66089 - DNA, 23 bp, Homo Sapiens
ggggatgtagctcagtggtagag

SEQ ID NO: 66090 - DNA, 24 bp, Homo Sapiens
ggggatgtagctcagtggtagagc

SEQ ID NO: 66091 - DNA, 16 bp, Homo Sapiens
ggggattgtgggttcg

SEQ ID NO: 66092 - DNA, 22 bp, Homo Sapiens
ggggattgtgggttcgagtccc

SEQ ID NO: 66093 - DNA, 16 bp, Homo Sapiens
gggggattagctcaaa

SEQ ID NO: 66094 - DNA, 19 bp, Homo Sapiens
gggggattagctcaaatgg

SEQ ID NO: 66095 - DNA, 20 bp, Homo Sapiens
gggggattagctcaaatggt

SEQ ID NO: 66096 - DNA, 21 bp, Homo Sapiens
gggggattagctcaaatggta

SEQ ID NO: 66097 - DNA, 16 bp, Homo Sapiens
gggggtatagctcagt

SEQ ID NO: 66098 - DNA, 18 bp, Homo Sapiens
gggggtatagctcagtgg

SEQ ID NO: 66099 - DNA, 19 bp, Homo Sapiens
gggggtatagctcagtggg

SEQ ID NO: 66100 - DNA, 19 bp, Homo Sapiens
gggggtatagctcagtggt

SEQ ID NO: 66101 - DNA, 16 bp, Homo Sapiens
gggggtgtagctcagt

SEQ ID NO: 66102 - DNA, 17 bp, Homo Sapiens
gggggtgtagctcagtg

SEQ ID NO: 66103 - DNA, 18 bp, Homo Sapiens
gggggtgtagctcagtgg

SEQ ID NO: 66104 - DNA, 19 bp, Homo Sapiens
gggggtgtagctcagtggt

SEQ ID NO: 66105 - DNA, 20 bp, Homo Sapiens
gggggtgtagctcagtggta

SEQ ID NO: 66106 - DNA, 22 bp, Homo Sapiens
gggggtgtagctcagtggtaga

SEQ ID NO: 66107 - DNA, 16 bp, Homo Sapiens
ggggtatgattctcgc

SEQ ID NO: 66108 - DNA, 17 bp, Homo Sapiens
ggggtatgattctcgct

SEQ ID NO: 66109 - DNA, 16 bp, Homo Sapiens
ggggtatgattctcgg

SEQ ID NO: 66110 - DNA, 17 bp, Homo Sapiens
ggggtatgattctcggt

SEQ ID NO: 66111 - DNA, 21 bp, Homo Sapiens
ggggtatgattctcggtttgg

SEQ ID NO: 66112 - DNA, 17 bp, Homo Sapiens
ggggttcgattccttcc

SEQ ID NO: 66113 - DNA, 18 bp, Homo Sapiens
ggggttcgattccttcct

SEQ ID NO: 66114 - DNA, 20 bp, Homo Sapiens
ggggttttgcagtccttacc

SEQ ID NO: 66115 - DNA, 16 bp, Homo Sapiens
gggtatagctcagtgg

SEQ ID NO: 66116 - DNA, 16 bp, Homo Sapiens
gggtatgattctcgct

SEQ ID NO: 66117 - DNA, 17 bp, Homo Sapiens
gggtatgattctcgctt

SEQ ID NO: 66118 - DNA, 16 bp, Homo Sapiens
gggtatgattctcggt

SEQ ID NO: 66119 - DNA, 20 bp, Homo Sapiens
gggtatgattctcggtttgg

SEQ ID NO: 66120 - DNA, 16 bp, Homo Sapiens
gggtgcgagaggtccc

SEQ ID NO: 66121 - DNA, 18 bp, Homo Sapiens
gggtgcgagaggtcccgg

SEQ ID NO: 66122 - DNA, 17 bp, Homo Sapiens
gggttcgattcccgggc

SEQ ID NO: 66123 - DNA, 20 bp, Homo Sapiens
gggttcgattcccggtcagg

SEQ ID NO: 66124 - DNA, 21 bp, Homo Sapiens
gggttcgattcccggtcaggg

SEQ ID NO: 66125 - DNA, 22 bp, Homo Sapiens
gggttcgattcccggtcaggga

SEQ ID NO: 66126 - DNA, 23 bp, Homo Sapiens
gggttcgattcccggtcagggaa

SEQ ID NO: 66127 - DNA, 24 bp, Homo Sapiens
gggttcgattcccggtcagggaac

SEQ ID NO: 66128 - DNA, 18 bp, Homo Sapiens
gggtttccccgcgcaggt

SEQ ID NO: 66129 - DNA, 20 bp, Homo Sapiens
gggttttgcagtccttacca

SEQ ID NO: 66130 - DNA, 16 bp, Homo Sapiens
ggtaaaatggctgagt

SEQ ID NO: 66131 - DNA, 17 bp, Homo Sapiens
ggtaaaatggctgagtg

SEQ ID NO: 66132 - DNA, 18 bp, Homo Sapiens
ggtaaaatggctgagtga

SEQ ID NO: 66133 - DNA, 19 bp, Homo Sapiens
ggtaaaatggctgagtgaa

SEQ ID NO: 66134 - DNA, 20 bp, Homo Sapiens
ggtaaaatggctgagtgaag

SEQ ID NO: 66135 - DNA, 21 bp, Homo Sapiens
ggtaaaatggctgagtgaagc

SEQ ID NO: 66136 - DNA, 22 bp, Homo Sapiens
ggtaaaatggctgagtgaagca

SEQ ID NO: 66137 - DNA, 24 bp, Homo Sapiens
ggtaaaatggctgagtgaagcatt

SEQ ID NO: 66138 - DNA, 25 bp, Homo Sapiens
ggtaaaatggctgagtgaagcattg

SEQ ID NO: 66139 - DNA, 17 bp, Homo Sapiens
ggtaaatatagtttaac

SEQ ID NO: 66140 - DNA, 18 bp, Homo Sapiens
ggtaaatatagtttaacc

SEQ ID NO: 66141 - DNA, 18 bp, Homo Sapiens
ggtagaattctcgcctgc

SEQ ID NO: 66142 - DNA, 19 bp, Homo Sapiens
ggtagaattctcgcctgcc

SEQ ID NO: 66143 - DNA, 17 bp, Homo Sapiens
ggtagagcatgagactc

SEQ ID NO: 66144 - DNA, 18 bp, Homo Sapiens
ggtagagcatgagactct

SEQ ID NO: 66145 - DNA, 19 bp, Homo Sapiens
ggtagagcatgagactctt

SEQ ID NO: 66146 - DNA, 17 bp, Homo Sapiens
ggtagagcatgggactc

SEQ ID NO: 66147 - DNA, 18 bp, Homo Sapiens
ggtagagcatgggactct

SEQ ID NO: 66148 - DNA, 19 bp, Homo Sapiens
ggtagagcatgggactctt

SEQ ID NO: 66149 - DNA, 16 bp, Homo Sapiens
ggtagcgtggccgagc

SEQ ID NO: 66150 - DNA, 17 bp, Homo Sapiens
ggtagcgtggccgagcg

SEQ ID NO: 66151 - DNA, 18 bp, Homo Sapiens
ggtagcgtggccgagcgg

SEQ ID NO: 66152 - DNA, 19 bp, Homo Sapiens
ggtagcgtggccgagcggt

SEQ ID NO: 66153 - DNA, 20 bp, Homo Sapiens
ggtagcgtggccgagcggtc

SEQ ID NO: 66154 - DNA, 21 bp, Homo Sapiens
ggtagcgtggccgagcggtct

SEQ ID NO: 66155 - DNA, 22 bp, Homo Sapiens
ggtagcgtggccgagcggtcta

SEQ ID NO: 66156 - DNA, 16 bp, Homo Sapiens
ggtagcgtggccgagt

SEQ ID NO: 66157 - DNA, 18 bp, Homo Sapiens
ggtagcgtggccgagtgg

SEQ ID NO: 66158 - DNA, 16 bp, Homo Sapiens
ggtagggtggccgagc

SEQ ID NO: 66159 - DNA, 16 bp, Homo Sapiens
ggtagtgtggccgagc

SEQ ID NO: 66160 - DNA, 19 bp, Homo Sapiens
ggtatgattctcgcttcgg

SEQ ID NO: 66161 - DNA, 19 bp, Homo Sapiens
ggtatgattctcgctttgg

SEQ ID NO: 66162 - DNA, 19 bp, Homo Sapiens
ggtatgattctcggtttgg

SEQ ID NO: 66163 - DNA, 18 bp, Homo Sapiens
ggtcccatggtgtaatgg

SEQ ID NO: 66164 - DNA, 19 bp, Homo Sapiens
ggtcccatggtgtaatggt

SEQ ID NO: 66165 - DNA, 19 bp, Homo Sapiens
ggtcgtgggttcgagcccc

SEQ ID NO: 66166 - DNA, 16 bp, Homo Sapiens
ggtcgtggttgtagtc

SEQ ID NO: 66167 - DNA, 17 bp, Homo Sapiens
ggtcgtggttgtagtcc

SEQ ID NO: 66168 - DNA, 21 bp, Homo Sapiens
ggtcgtggttgtagtccgtgc

SEQ ID NO: 66169 - DNA, 16 bp, Homo Sapiens
ggtggagttaaagact

SEQ ID NO: 66170 - DNA, 17 bp, Homo Sapiens
ggtggagttaaagactt

SEQ ID NO: 66171 - DNA, 18 bp, Homo Sapiens
ggtggagttaaagacttt

SEQ ID NO: 66172 - DNA, 19 bp, Homo Sapiens
ggtggagttaaagactttt

SEQ ID NO: 66173 - DNA, 20 bp, Homo Sapiens
ggtggagttaaagacttttt

SEQ ID NO: 66174 - DNA, 19 bp, Homo Sapiens
ggtggttcagtggtagaat

SEQ ID NO: 66175 - DNA, 21 bp, Homo Sapiens
ggtggttcagtggtagaattc

SEQ ID NO: 66176 - DNA, 22 bp, Homo Sapiens
ggtggttcagtggtagaattct

SEQ ID NO: 66177 - DNA, 23 bp, Homo Sapiens
ggtggttcagtggtagaattctc

SEQ ID NO: 66178 - DNA, 25 bp, Homo Sapiens
ggtggttcagtggtagaattctcgc

SEQ ID NO: 66179 - DNA, 17 bp, Homo Sapiens
ggttagcactctggact

SEQ ID NO: 66180 - DNA, 18 bp, Homo Sapiens
ggttagcactctggactc

SEQ ID NO: 66181 - DNA, 19 bp, Homo Sapiens
ggttagcactctggactct

SEQ ID NO: 66182 - DNA, 20 bp, Homo Sapiens
ggttagcactctggactctg

SEQ ID NO: 66183 - DNA, 20 bp, Homo Sapiens
ggttagcactctggactttg

SEQ ID NO: 66184 - DNA, 20 bp, Homo Sapiens
ggttaggattcctggttttc

SEQ ID NO: 66185 - DNA, 16 bp, Homo Sapiens
ggttaggattcggcgc

SEQ ID NO: 66186 - DNA, 17 bp, Homo Sapiens
ggttaggattcggcgct

SEQ ID NO: 66187 - DNA, 18 bp, Homo Sapiens
ggttaggattcggcgctc

SEQ ID NO: 66188 - DNA, 19 bp, Homo Sapiens
ggttaggattcggcgctct

SEQ ID NO: 66189 - DNA, 20 bp, Homo Sapiens
ggttaggattcggcgctctc

SEQ ID NO: 66190 - DNA, 16 bp, Homo Sapiens
ggttagtactctgcgt

SEQ ID NO: 66191 - DNA, 17 bp, Homo Sapiens
ggttagtactctgcgtt

SEQ ID NO: 66192 - DNA, 18 bp, Homo Sapiens
ggttagtactctgcgttg

SEQ ID NO: 66193 - DNA, 19 bp, Homo Sapiens
ggttagtactctgcgttgt

SEQ ID NO: 66194 - DNA, 16 bp, Homo Sapiens
ggttcaaatcccggac

SEQ ID NO: 66195 - DNA, 17 bp, Homo Sapiens
ggttcaaatcccggacg

SEQ ID NO: 66196 - DNA, 19 bp, Homo Sapiens
ggttcaaatcccggacgag

SEQ ID NO: 66197 - DNA, 20 bp, Homo Sapiens
ggttcaaatcccggacgagc

SEQ ID NO: 66198 - DNA, 23 bp, Homo Sapiens
ggttcaaatcccggacgagcccc

SEQ ID NO: 66199 - DNA, 24 bp, Homo Sapiens
ggttcaaatcccggacgagccccc

SEQ ID NO: 66200 - DNA, 24 bp, Homo Sapiens
ggttcaaatccgggtgccccctcc

SEQ ID NO: 66201 - DNA, 22 bp, Homo Sapiens
ggttcagtggtagaattctcgc

SEQ ID NO: 66202 - DNA, 19 bp, Homo Sapiens
ggttccatagtgtagcggt

SEQ ID NO: 66203 - DNA, 18 bp, Homo Sapiens
ggttccatagtgtagtgg

SEQ ID NO: 66204 - DNA, 19 bp, Homo Sapiens
ggttccatagtgtagtggt

SEQ ID NO: 66205 - DNA, 16 bp, Homo Sapiens
ggttccatggtgtaat

SEQ ID NO: 66206 - DNA, 18 bp, Homo Sapiens
ggttccatggtgtaatgg

SEQ ID NO: 66207 - DNA, 19 bp, Homo Sapiens
ggttccatggtgtaatggt

SEQ ID NO: 66208 - DNA, 22 bp, Homo Sapiens
ggttccgggttcgagtcccggc

SEQ ID NO: 66209 - DNA, 19 bp, Homo Sapiens
ggttcgaaaccgggcggaa

SEQ ID NO: 66210 - DNA, 21 bp, Homo Sapiens
ggttcgaaaccgggcggaaac

SEQ ID NO: 66211 - DNA, 23 bp, Homo Sapiens
ggttcgactcccggtgtgggaac

SEQ ID NO: 66212 - DNA, 20 bp, Homo Sapiens
ggttcgatccccgtacgggc

SEQ ID NO: 66213 - DNA, 23 bp, Homo Sapiens
ggttcgattcccggtcagggaac

SEQ ID NO: 66214 - DNA, 16 bp, Homo Sapiens
ggttgtagtccgtgcg

SEQ ID NO: 66215 - DNA, 18 bp, Homo Sapiens
ggttgtagtccgtgcgag

SEQ ID NO: 66216 - DNA, 19 bp, Homo Sapiens
ggttgtagtccgtgcgaga

SEQ ID NO: 66217 - DNA, 20 bp, Homo Sapiens
ggttgtagtccgtgcgagaa

SEQ ID NO: 66218 - DNA, 21 bp, Homo Sapiens
ggttgtagtccgtgcgagaat

SEQ ID NO: 66219 - DNA, 22 bp, Homo Sapiens
ggttgtagtccgtgcgagaata

SEQ ID NO: 66220 - DNA, 24 bp, Homo Sapiens
ggttgtagtccgtgcgagaatacc

SEQ ID NO: 66221 - DNA, 25 bp, Homo Sapiens
ggttgtagtccgtgcgagaatacca

SEQ ID NO: 66222 - DNA, 19 bp, Homo Sapiens
ggttttgcagtccttacca

SEQ ID NO: 66223 - DNA, 20 bp, Homo Sapiens
ggtttttcatatcattggtc

SEQ ID NO: 66224 - DNA, 21 bp, Homo Sapiens
ggtttttcatatcattggtcg

SEQ ID NO: 66225 - DNA, 18 bp, Homo Sapiens
gtaaaccaggggtcgcga

SEQ ID NO: 66226 - DNA, 18 bp, Homo Sapiens
gtaaaccggagatgaaaa

SEQ ID NO: 66227 - DNA, 19 bp, Homo Sapiens
gtaaaccggagatgaaaac

SEQ ID NO: 66228 - DNA, 20 bp, Homo Sapiens
gtaaaccggagatgaaaacc

SEQ ID NO: 66229 - DNA, 21 bp, Homo Sapiens
gtaaaccggagatgaaaacct

SEQ ID NO: 66230 - DNA, 18 bp, Homo Sapiens
gtaaataataggagctta

SEQ ID NO: 66231 - DNA, 19 bp, Homo Sapiens
gtaaataataggagcttaa

SEQ ID NO: 66232 - DNA, 21 bp, Homo Sapiens
gtaaataataggagcttaaac

SEQ ID NO: 66233 - DNA, 16 bp, Homo Sapiens
gtaaggtcagctaaat

SEQ ID NO: 66234 - DNA, 17 bp, Homo Sapiens
gtaaggtcagctaaata

SEQ ID NO: 66235 - DNA, 20 bp, Homo Sapiens
gtaaggtcagctaaataagc

SEQ ID NO: 66236 - DNA, 19 bp, Homo Sapiens
gtaatggttagcactctgg

SEQ ID NO: 66237 - DNA, 20 bp, Homo Sapiens
gtaatggttagcactctgga

SEQ ID NO: 66238 - DNA, 17 bp, Homo Sapiens
gtagaattctcgcctgc

SEQ ID NO: 66239 - DNA, 18 bp, Homo Sapiens
gtagaattctcgcctgcc

SEQ ID NO: 66240 - DNA, 19 bp, Homo Sapiens
gtagaattctcgcctgcca

SEQ ID NO: 66241 - DNA, 16 bp, Homo Sapiens
gtagagcatgagactc

SEQ ID NO: 66242 - DNA, 18 bp, Homo Sapiens
gtagagcatgagactctt

SEQ ID NO: 66243 - DNA, 17 bp, Homo Sapiens
gtagagcatgggactct

SEQ ID NO: 66244 - DNA, 18 bp, Homo Sapiens
gtagagcatgggactctt

SEQ ID NO: 66245 - DNA, 17 bp, Homo Sapiens
gtagtccgtgcgagaat

SEQ ID NO: 66246 - DNA, 18 bp, Homo Sapiens
gtagtccgtgcgagaata

SEQ ID NO: 66247 - DNA, 19 bp, Homo Sapiens
gtagtccgtgcgagaatac

SEQ ID NO: 66248 - DNA, 20 bp, Homo Sapiens
gtagtccgtgcgagaatacc

SEQ ID NO: 66249 - DNA, 21 bp, Homo Sapiens
gtagtccgtgcgagaatacca

SEQ ID NO: 66250 - DNA, 16 bp, Homo Sapiens
gtagtcgtggccgagt

SEQ ID NO: 66251 - DNA, 17 bp, Homo Sapiens
gtagtcgtggccgagtg

SEQ ID NO: 66252 - DNA, 18 bp, Homo Sapiens
gtagtcgtggccgagtgg

SEQ ID NO: 66253 - DNA, 19 bp, Homo Sapiens
gtagtcgtggccgagtggt

SEQ ID NO: 66254 - DNA, 20 bp, Homo Sapiens
gtagtcgtggccgagtggtt

SEQ ID NO: 66255 - DNA, 21 bp, Homo Sapiens
gtagtcgtggccgagtggtta

SEQ ID NO: 66256 - DNA, 22 bp, Homo Sapiens
gtagtcgtggccgagtggttaa

SEQ ID NO: 66257 - DNA, 23 bp, Homo Sapiens
gtagtcgtggccgagtggttaag

SEQ ID NO: 66258 - DNA, 24 bp, Homo Sapiens
gtagtcgtggccgagtggttaagg

SEQ ID NO: 66259 - DNA, 25 bp, Homo Sapiens
gtagtcgtggccgagtggttaaggc

SEQ ID NO: 66260 - DNA, 19 bp, Homo Sapiens
gtatagtggttagtactct

SEQ ID NO: 66261 - DNA, 21 bp, Homo Sapiens
gtatagtggttagtactctgc

SEQ ID NO: 66262 - DNA, 18 bp, Homo Sapiens
gtatgattctcggtttgg

SEQ ID NO: 66263 - DNA, 18 bp, Homo Sapiens
gtcacggtggccgagtgg

SEQ ID NO: 66264 - DNA, 17 bp, Homo Sapiens
gtcacgtcggggtcacc

SEQ ID NO: 66265 - DNA, 18 bp, Homo Sapiens
gtcacgtcggggtcacca

SEQ ID NO: 66266 - DNA, 17 bp, Homo Sapiens
gtcagaggttcaattcc

SEQ ID NO: 66267 - DNA, 19 bp, Homo Sapiens
gtcagaggttcaattcctc

SEQ ID NO: 66268 - DNA, 20 bp, Homo Sapiens
gtcagaggttcaattcctct

SEQ ID NO: 66269 - DNA, 16 bp, Homo Sapiens
gtcaggatggccgagc

SEQ ID NO: 66270 - DNA, 18 bp, Homo Sapiens
gtcaggatggccgagcgg

SEQ ID NO: 66271 - DNA, 19 bp, Homo Sapiens
gtcaggatggccgagcggt

SEQ ID NO: 66272 - DNA, 20 bp, Homo Sapiens
gtcaggatggccgagcggtc

SEQ ID NO: 66273 - DNA, 21 bp, Homo Sapiens
gtcaggatggccgagcggtct

SEQ ID NO: 66274 - DNA, 22 bp, Homo Sapiens
gtcaggatggccgagcggtcta

SEQ ID NO: 66275 - DNA, 25 bp, Homo Sapiens
gtcaggatggccgagcggtctaagg

SEQ ID NO: 66276 - DNA, 18 bp, Homo Sapiens
gtcaggatggccgagtgg

SEQ ID NO: 66277 - DNA, 21 bp, Homo Sapiens
gtcaggatggccgagtggtct

SEQ ID NO: 66278 - DNA, 22 bp, Homo Sapiens
gtcaggatggccgagtggtcta

SEQ ID NO: 66279 - DNA, 25 bp, Homo Sapiens
gtcaggatggccgagtggtctaagg

SEQ ID NO: 66280 - DNA, 18 bp, Homo Sapiens
gtcccatctggggtgcca

SEQ ID NO: 66281 - DNA, 18 bp, Homo Sapiens
gtcccatctgggtcgcca

SEQ ID NO: 66282 - DNA, 17 bp, Homo Sapiens
gtcccattggtctagcc

SEQ ID NO: 66283 - DNA, 18 bp, Homo Sapiens
gtcccattggtctagcca

SEQ ID NO: 66284 - DNA, 21 bp, Homo Sapiens
gtccccggttcaaatccgggt

SEQ ID NO: 66285 - DNA, 18 bp, Homo Sapiens
gtcccggcagagatgcca

SEQ ID NO: 66286 - DNA, 18 bp, Homo Sapiens
gtcccggcggagtcgcca

SEQ ID NO: 66287 - DNA, 16 bp, Homo Sapiens
gtcccgggttcaaatc

SEQ ID NO: 66288 - DNA, 17 bp, Homo Sapiens
gtcccgggttcaaatcc

SEQ ID NO: 66289 - DNA, 18 bp, Homo Sapiens
gtcccgggttcaaatccc

SEQ ID NO: 66290 - DNA, 20 bp, Homo Sapiens
gtcccgggttcaaatcccgg

SEQ ID NO: 66291 - DNA, 21 bp, Homo Sapiens
gtcccgggttcaaatcccgga

SEQ ID NO: 66292 - DNA, 16 bp, Homo Sapiens
gtccctgttcgggcgc

SEQ ID NO: 66293 - DNA, 17 bp, Homo Sapiens
gtccctgttcgggcgcc

SEQ ID NO: 66294 - DNA, 18 bp, Homo Sapiens
gtccctgttcgggcgcca

SEQ ID NO: 66295 - DNA, 17 bp, Homo Sapiens
gtccgtgcgagaatacc

SEQ ID NO: 66296 - DNA, 18 bp, Homo Sapiens
gtccgtgcgagaatacca

SEQ ID NO: 66297 - DNA, 17 bp, Homo Sapiens
gtcctgccgcggtcgcc

SEQ ID NO: 66298 - DNA, 18 bp, Homo Sapiens
gtcctgccgcggtcgcca

SEQ ID NO: 66299 - DNA, 17 bp, Homo Sapiens
gtccttgtagtataaac

SEQ ID NO: 66300 - DNA, 18 bp, Homo Sapiens
gtccttgtagtataaact

SEQ ID NO: 66301 - DNA, 19 bp, Homo Sapiens
gtccttgtagtataaacta

SEQ ID NO: 66302 - DNA, 17 bp, Homo Sapiens
gtcggtagagcatcaga

SEQ ID NO: 66303 - DNA, 18 bp, Homo Sapiens
gtcggtagagcatcagac

SEQ ID NO: 66304 - DNA, 16 bp, Homo Sapiens
gtcggtagagcatgag

SEQ ID NO: 66305 - DNA, 17 bp, Homo Sapiens
gtcggtagagcatgaga

SEQ ID NO: 66306 - DNA, 18 bp, Homo Sapiens
gtcggtagagcatgagac

SEQ ID NO: 66307 - DNA, 19 bp, Homo Sapiens
gtcggtagagcatgagact

SEQ ID NO: 66308 - DNA, 20 bp, Homo Sapiens
gtcggtagagcatgagactc

SEQ ID NO: 66309 - DNA, 21 bp, Homo Sapiens
gtcggtagagcatgagactct

SEQ ID NO: 66310 - DNA, 22 bp, Homo Sapiens
gtcggtagagcatgagactctt

SEQ ID NO: 66311 - DNA, 17 bp, Homo Sapiens
gtcggtagagcatggga

SEQ ID NO: 66312 - DNA, 18 bp, Homo Sapiens
gtcggtagagcatgggac

SEQ ID NO: 66313 - DNA, 19 bp, Homo Sapiens
gtcggtagagcatgggact

SEQ ID NO: 66314 - DNA, 20 bp, Homo Sapiens
gtcggtagagcatgggactc

SEQ ID NO: 66315 - DNA, 21 bp, Homo Sapiens
gtcggtagagcatgggactct

SEQ ID NO: 66316 - DNA, 17 bp, Homo Sapiens
gtcgtgggttcgagccc

SEQ ID NO: 66317 - DNA, 18 bp, Homo Sapiens
gtcgtgggttcgagcccc

SEQ ID NO: 66318 - DNA, 16 bp, Homo Sapiens
gtctaacaacatggct

SEQ ID NO: 66319 - DNA, 24 bp, Homo Sapiens
gtctaacaacatggctttctcacc

SEQ ID NO: 66320 - DNA, 25 bp, Homo Sapiens
gtctaacaacatggctttctcacca

SEQ ID NO: 66321 - DNA, 21 bp, Homo Sapiens
gtctagtggttaggattcggc

SEQ ID NO: 66322 - DNA, 17 bp, Homo Sapiens
gtctcggtggaacctcc

SEQ ID NO: 66323 - DNA, 18 bp, Homo Sapiens
gtctcggtggaacctcca

SEQ ID NO: 66324 - DNA, 16 bp, Homo Sapiens
gtctctgtggcgcaat

SEQ ID NO: 66325 - DNA, 17 bp, Homo Sapiens
gtctctgtggcgcaatc

SEQ ID NO: 66326 - DNA, 18 bp, Homo Sapiens
gtctctgtggcgcaatcg

SEQ ID NO: 66327 - DNA, 19 bp, Homo Sapiens
gtctctgtggcgcaatcgg

SEQ ID NO: 66328 - DNA, 20 bp, Homo Sapiens
gtctctgtggcgcaatcggc

SEQ ID NO: 66329 - DNA, 20 bp, Homo Sapiens
gtctctgtggcgcaatcggt

SEQ ID NO: 66330 - DNA, 18 bp, Homo Sapiens
gtctctgtggcgcaatgg

SEQ ID NO: 66331 - DNA, 19 bp, Homo Sapiens
gtctctgtggcgcaatgga

SEQ ID NO: 66332 - DNA, 20 bp, Homo Sapiens
gtctctgtggcgcaatggac

SEQ ID NO: 66333 - DNA, 21 bp, Homo Sapiens
gtctctgtggcgcaatggacg

SEQ ID NO: 66334 - DNA, 19 bp, Homo Sapiens
gtctctgtggcgcaatggg

SEQ ID NO: 66335 - DNA, 18 bp, Homo Sapiens
gtctcttcgggggcgtgg

SEQ ID NO: 66336 - DNA, 16 bp, Homo Sapiens
gtgaagcattggactg

SEQ ID NO: 66337 - DNA, 17 bp, Homo Sapiens
gtgaagcattggactgt

SEQ ID NO: 66338 - DNA, 18 bp, Homo Sapiens
gtgaagcattggactgta

SEQ ID NO: 66339 - DNA, 16 bp, Homo Sapiens
gtgaatctgacaacag

SEQ ID NO: 66340 - DNA, 18 bp, Homo Sapiens
gtgaatctgacaacagag

SEQ ID NO: 66341 - DNA, 19 bp, Homo Sapiens
gtgaatctgacaacagagg

SEQ ID NO: 66342 - DNA, 20 bp, Homo Sapiens
gtgaatctgacaacagaggc

SEQ ID NO: 66343 - DNA, 21 bp, Homo Sapiens
gtgaatctgacaacagaggct

SEQ ID NO: 66344 - DNA, 22 bp, Homo Sapiens
gtgaatctgacaacagaggctt

SEQ ID NO: 66345 - DNA, 19 bp, Homo Sapiens
gtgatcgtatagtggttag

SEQ ID NO: 66346 - DNA, 20 bp, Homo Sapiens
gtgatcgtatagtggttagt

SEQ ID NO: 66347 - DNA, 23 bp, Homo Sapiens
gtgatcgtatagtggttagtact

SEQ ID NO: 66348 - DNA, 24 bp, Homo Sapiens
gtgatcgtatagtggttagtactc

SEQ ID NO: 66349 - DNA, 25 bp, Homo Sapiens
gtgatcgtatagtggttagtactct

SEQ ID NO: 66350 - DNA, 17 bp, Homo Sapiens
gtgcaactccaaataaa

SEQ ID NO: 66351 - DNA, 21 bp, Homo Sapiens
gtgcaactccaaataaaagta

SEQ ID NO: 66352 - DNA, 22 bp, Homo Sapiens
gtgcaactccaaataaaagtac

SEQ ID NO: 66353 - DNA, 23 bp, Homo Sapiens
gtgcaactccaaataaaagtacc

SEQ ID NO: 66354 - DNA, 24 bp, Homo Sapiens
gtgcaactccaaataaaagtacca

SEQ ID NO: 66355 - DNA, 21 bp, Homo Sapiens
gtgctgggcccataacccaga

SEQ ID NO: 66356 - DNA, 16 bp, Homo Sapiens
gtggagttaaagactt

SEQ ID NO: 66357 - DNA, 17 bp, Homo Sapiens
gtggagttaaagacttt

SEQ ID NO: 66358 - DNA, 18 bp, Homo Sapiens
gtggagttaaagactttt

SEQ ID NO: 66359 - DNA, 19 bp, Homo Sapiens
gtggagttaaagacttttt

SEQ ID NO: 66360 - DNA, 20 bp, Homo Sapiens
gtggagttaaagactttttc

SEQ ID NO: 66361 - DNA, 22 bp, Homo Sapiens
gtggagttaaagactttttctc

SEQ ID NO: 66362 - DNA, 18 bp, Homo Sapiens
gtggcacggagaattttg

SEQ ID NO: 66363 - DNA, 17 bp, Homo Sapiens
gtggccgagtggttaag

SEQ ID NO: 66364 - DNA, 23 bp, Homo Sapiens
gtggggttttgcagtccttacca

SEQ ID NO: 66365 - DNA, 16 bp, Homo Sapiens
gtggtagaattctcgc

SEQ ID NO: 66366 - DNA, 17 bp, Homo Sapiens
gtggtagaattctcgcc

SEQ ID NO: 66367 - DNA, 18 bp, Homo Sapiens
gtggtagaattctcgcct

SEQ ID NO: 66368 - DNA, 19 bp, Homo Sapiens
gtggtagaattctcgcctg

SEQ ID NO: 66369 - DNA, 20 bp, Homo Sapiens
gtggtagaattctcgcctgc

SEQ ID NO: 66370 - DNA, 21 bp, Homo Sapiens
gtggtagaattctcgcctgcc

SEQ ID NO: 66371 - DNA, 20 bp, Homo Sapiens
gtggtagagcatttgactgc

SEQ ID NO: 66372 - DNA, 18 bp, Homo Sapiens
gtggtatcatgcaagatt

SEQ ID NO: 66373 - DNA, 21 bp, Homo Sapiens
gtggtctagtggttaggattc

SEQ ID NO: 66374 - DNA, 24 bp, Homo Sapiens
gtggtctagtggttaggattcggc

SEQ ID NO: 66375 - DNA, 16 bp, Homo Sapiens
gtggttaggattcggc

SEQ ID NO: 66376 - DNA, 17 bp, Homo Sapiens
gtggttaggattcggcg

SEQ ID NO: 66377 - DNA, 18 bp, Homo Sapiens
gtggttaggattcggcgc

SEQ ID NO: 66378 - DNA, 19 bp, Homo Sapiens
gtggttaggattcggcgct

SEQ ID NO: 66379 - DNA, 20 bp, Homo Sapiens
gtggttaggattcggcgctc

SEQ ID NO: 66380 - DNA, 21 bp, Homo Sapiens
gtggttaggattcggcgctct

SEQ ID NO: 66381 - DNA, 22 bp, Homo Sapiens
gtggttaggattcggcgctctc

SEQ ID NO: 66382 - DNA, 16 bp, Homo Sapiens
gtggttagtactctgc

SEQ ID NO: 66383 - DNA, 17 bp, Homo Sapiens
gtggttagtactctgcg

SEQ ID NO: 66384 - DNA, 18 bp, Homo Sapiens
gtggttagtactctgcgt

SEQ ID NO: 66385 - DNA, 19 bp, Homo Sapiens
gtggttagtactctgcgtt

SEQ ID NO: 66386 - DNA, 20 bp, Homo Sapiens
gtggttagtactctgcgttg

SEQ ID NO: 66387 - DNA, 20 bp, Homo Sapiens
gtggttcagtggtagaattc

SEQ ID NO: 66388 - DNA, 21 bp, Homo Sapiens
gtggttcagtggtagaattct

SEQ ID NO: 66389 - DNA, 22 bp, Homo Sapiens
gtggttcagtggtagaattctc

SEQ ID NO: 66390 - DNA, 24 bp, Homo Sapiens
gtggttcagtggtagaattctcgc

SEQ ID NO: 66391 - DNA, 25 bp, Homo Sapiens
gtggttcagtggtagaattctcgcc

SEQ ID NO: 66392 - DNA, 17 bp, Homo Sapiens
gtggttgtagtccgtgc

SEQ ID NO: 66393 - DNA, 18 bp, Homo Sapiens
gtggttgtagtccgtgcg

SEQ ID NO: 66394 - DNA, 19 bp, Homo Sapiens
gtggttgtagtccgtgcga

SEQ ID NO: 66395 - DNA, 20 bp, Homo Sapiens
gtggttgtagtccgtgcgag

SEQ ID NO: 66396 - DNA, 21 bp, Homo Sapiens
gtggttgtagtccgtgcgaga

SEQ ID NO: 66397 - DNA, 22 bp, Homo Sapiens
gtggttgtagtccgtgcgagaa

SEQ ID NO: 66398 - DNA, 23 bp, Homo Sapiens
gtggttgtagtccgtgcgagaat

SEQ ID NO: 66399 - DNA, 24 bp, Homo Sapiens
gtggttgtagtccgtgcgagaata

SEQ ID NO: 66400 - DNA, 25 bp, Homo Sapiens
gtggttgtagtccgtgcgagaatac

SEQ ID NO: 66401 - DNA, 21 bp, Homo Sapiens
gtgtaatggttagcactctgg

SEQ ID NO: 66402 - DNA, 17 bp, Homo Sapiens
gttaaagactttttctc

SEQ ID NO: 66403 - DNA, 20 bp, Homo Sapiens
gttaaagactttttctctga

SEQ ID NO: 66404 - DNA, 21 bp, Homo Sapiens
gttaaagactttttctctgac

SEQ ID NO: 66405 - DNA, 22 bp, Homo Sapiens
gttaaagactttttctctgacc

SEQ ID NO: 66406 - DNA, 23 bp, Homo Sapiens
gttaaagactttttctctgacca

SEQ ID NO: 66407 - DNA, 16 bp, Homo Sapiens
gttaaagattaagaga

SEQ ID NO: 66408 - DNA, 17 bp, Homo Sapiens
gttaaagattaagagaa

SEQ ID NO: 66409 - DNA, 18 bp, Homo Sapiens
gttaaagattaagagaac

SEQ ID NO: 66410 - DNA, 19 bp, Homo Sapiens
gttaaagattaagagaacc

SEQ ID NO: 66411 - DNA, 20 bp, Homo Sapiens
gttaaagattaagagaacca

SEQ ID NO: 66412 - DNA, 21 bp, Homo Sapiens
gttaaagattaagagaaccaa

SEQ ID NO: 66413 - DNA, 22 bp, Homo Sapiens
gttaaagattaagagaaccaac

SEQ ID NO: 66414 - DNA, 23 bp, Homo Sapiens
gttaaagattaagagaaccaaca

SEQ ID NO: 66415 - DNA, 25 bp, Homo Sapiens
gttaaagattaagagaaccaacacc

SEQ ID NO: 66416 - DNA, 20 bp, Homo Sapiens
gttaaatacagaccaagagc

SEQ ID NO: 66417 - DNA, 17 bp, Homo Sapiens
gttaaattataggctaa

SEQ ID NO: 66418 - DNA, 16 bp, Homo Sapiens
gttaagatggcagagc

SEQ ID NO: 66419 - DNA, 17 bp, Homo Sapiens
gttaagatggcagagcc

SEQ ID NO: 66420 - DNA, 18 bp, Homo Sapiens
gttaagatggcagagccc

SEQ ID NO: 66421 - DNA, 19 bp, Homo Sapiens
gttaagatggcagagccca

SEQ ID NO: 66422 - DNA, 19 bp, Homo Sapiens
gttaagatggcagagcccg

SEQ ID NO: 66423 - DNA, 20 bp, Homo Sapiens
gttaagatggcagagcccgg

SEQ ID NO: 66424 - DNA, 21 bp, Homo Sapiens
gttaagatggcagagcccggc

SEQ ID NO: 66425 - DNA, 21 bp, Homo Sapiens
gttaagatggcagagcccggt

SEQ ID NO: 66426 - DNA, 22 bp, Homo Sapiens
gttaagatggcagagcccggta

SEQ ID NO: 66427 - DNA, 23 bp, Homo Sapiens
gttaagatggcagagcccggtaa

SEQ ID NO: 66428 - DNA, 24 bp, Homo Sapiens
gttaagatggcagagcccggtaat

SEQ ID NO: 66429 - DNA, 25 bp, Homo Sapiens
gttaagatggcagagcccggtaatc

SEQ ID NO: 66430 - DNA, 19 bp, Homo Sapiens
gttagcactctggactctg

SEQ ID NO: 66431 - DNA, 19 bp, Homo Sapiens
gttaggattcctggttttc

SEQ ID NO: 66432 - DNA, 16 bp, Homo Sapiens
gttaggattcggcgct

SEQ ID NO: 66433 - DNA, 17 bp, Homo Sapiens
gttaggattcggcgctc

SEQ ID NO: 66434 - DNA, 18 bp, Homo Sapiens
gttaggattcggcgctct

SEQ ID NO: 66435 - DNA, 19 bp, Homo Sapiens
gttaggattcggcgctctc

SEQ ID NO: 66436 - DNA, 21 bp, Homo Sapiens
gttaggcctctttttaccacc

SEQ ID NO: 66437 - DNA, 22 bp, Homo Sapiens
gttaggcctctttttaccacca

SEQ ID NO: 66438 - DNA, 17 bp, Homo Sapiens
gttagtactctgcgttg

SEQ ID NO: 66439 - DNA, 18 bp, Homo Sapiens
gttagtactctgcgttgt

SEQ ID NO: 66440 - DNA, 21 bp, Homo Sapiens
gttatacccttcccgtactac

SEQ ID NO: 66441 - DNA, 22 bp, Homo Sapiens
gttatacccttcccgtactacc

SEQ ID NO: 66442 - DNA, 23 bp, Homo Sapiens
gttatacccttcccgtactacca

SEQ ID NO: 66443 - DNA, 18 bp, Homo Sapiens
gttcaaatcccggacgag

SEQ ID NO: 66444 - DNA, 19 bp, Homo Sapiens
gttcaaatcccggacgagc

SEQ ID NO: 66445 - DNA, 16 bp, Homo Sapiens
gttcaaatccgggtgc

SEQ ID NO: 66446 - DNA, 18 bp, Homo Sapiens
gttcaaatccgggtgccc

SEQ ID NO: 66447 - DNA, 21 bp, Homo Sapiens
gttcaaatccgggtgccccct

SEQ ID NO: 66448 - DNA, 22 bp, Homo Sapiens
gttcaaatccgggtgccccctc

SEQ ID NO: 66449 - DNA, 23 bp, Homo Sapiens
gttcaaatccgggtgccccctcc

SEQ ID NO: 66450 - DNA, 19 bp, Homo Sapiens
gttcaggtcgcagtctccc

SEQ ID NO: 66451 - DNA, 21 bp, Homo Sapiens
gttcagtggtagaattctcgc

SEQ ID NO: 66452 - DNA, 20 bp, Homo Sapiens
gttccgggttcgagtcccgg

SEQ ID NO: 66453 - DNA, 21 bp, Homo Sapiens
gttccgggttcgagtcccggc

SEQ ID NO: 66454 - DNA, 19 bp, Homo Sapiens
gttcgaatccgagtcacgg

SEQ ID NO: 66455 - DNA, 23 bp, Homo Sapiens
gttcgaatccgagtcacggcacc

SEQ ID NO: 66456 - DNA, 22 bp, Homo Sapiens
gttcgactcccggtgtgggaac

SEQ ID NO: 66457 - DNA, 23 bp, Homo Sapiens
gttcgactcccggtgtgggaacc

SEQ ID NO: 66458 - DNA, 24 bp, Homo Sapiens
gttcgactcccggtgtgggaacca

SEQ ID NO: 66459 - DNA, 19 bp, Homo Sapiens
gttcgagccccagtggaac

SEQ ID NO: 66460 - DNA, 24 bp, Homo Sapiens
gttcgatcccgggtttcggcacca

SEQ ID NO: 66461 - DNA, 18 bp, Homo Sapiens
gttcgattcccgggcggc

SEQ ID NO: 66462 - DNA, 23 bp, Homo Sapiens
gttcgattccggctcgaaggacc

SEQ ID NO: 66463 - DNA, 18 bp, Homo Sapiens
gttcgattctcatagtcc

SEQ ID NO: 66464 - DNA, 16 bp, Homo Sapiens
gttcttgtagttgaaa

SEQ ID NO: 66465 - DNA, 17 bp, Homo Sapiens
gttcttgtagttgaaat

SEQ ID NO: 66466 - DNA, 18 bp, Homo Sapiens
gttcttgtagttgaaata

SEQ ID NO: 66467 - DNA, 19 bp, Homo Sapiens
gttcttgtagttgaaatac

SEQ ID NO: 66468 - DNA, 20 bp, Homo Sapiens
gttcttgtagttgaaataca

SEQ ID NO: 66469 - DNA, 21 bp, Homo Sapiens
gttgcaatacttaatttctgc

SEQ ID NO: 66470 - DNA, 22 bp, Homo Sapiens
gttgcaatacttaatttctgcc

SEQ ID NO: 66471 - DNA, 23 bp, Homo Sapiens
gttgcaatacttaatttctgcca

SEQ ID NO: 66472 - DNA, 18 bp, Homo Sapiens
gttgtagtccgtgcgaga

SEQ ID NO: 66473 - DNA, 19 bp, Homo Sapiens
gttgtagtccgtgcgagaa

SEQ ID NO: 66474 - DNA, 20 bp, Homo Sapiens
gttgtagtccgtgcgagaat

SEQ ID NO: 66475 - DNA, 21 bp, Homo Sapiens
gttgtagtccgtgcgagaata

SEQ ID NO: 66476 - DNA, 22 bp, Homo Sapiens
gttgtagtccgtgcgagaatac

SEQ ID NO: 66477 - DNA, 23 bp, Homo Sapiens
gttgtagtccgtgcgagaatacc

SEQ ID NO: 66478 - DNA, 24 bp, Homo Sapiens
gttgtagtccgtgcgagaatacca

SEQ ID NO: 66479 - DNA, 19 bp, Homo Sapiens
gtttaaccaaaacatcaga

SEQ ID NO: 66480 - DNA, 16 bp, Homo Sapiens
gtttagacgggctcac

SEQ ID NO: 66481 - DNA, 17 bp, Homo Sapiens
gtttagacgggctcaca

SEQ ID NO: 66482 - DNA, 18 bp, Homo Sapiens
gtttagacgggctcacat

SEQ ID NO: 66483 - DNA, 19 bp, Homo Sapiens
gtttagacgggctcacatc

SEQ ID NO: 66484 - DNA, 20 bp, Homo Sapiens
gtttagacgggctcacatca

SEQ ID NO: 66485 - DNA, 21 bp, Homo Sapiens
gtttagacgggctcacatcac

SEQ ID NO: 66486 - DNA, 22 bp, Homo Sapiens
gtttagacgggctcacatcacc

SEQ ID NO: 66487 - DNA, 23 bp, Homo Sapiens
gtttagacgggctcacatcaccc

SEQ ID NO: 66488 - DNA, 24 bp, Homo Sapiens
gtttagacgggctcacatcacccc

SEQ ID NO: 66489 - DNA, 25 bp, Homo Sapiens
gtttagacgggctcacatcacccca

SEQ ID NO: 66490 - DNA, 16 bp, Homo Sapiens
gtttatgtagcttacc

SEQ ID NO: 66491 - DNA, 17 bp, Homo Sapiens
gtttatgtagcttacct

SEQ ID NO: 66492 - DNA, 18 bp, Homo Sapiens
gtttatgtagcttacctc

SEQ ID NO: 66493 - DNA, 19 bp, Homo Sapiens
gtttatgtagcttacctcc

SEQ ID NO: 66494 - DNA, 20 bp, Homo Sapiens
gtttatgtagcttacctcct

SEQ ID NO: 66495 - DNA, 21 bp, Homo Sapiens
gtttatgtagcttacctcctc

SEQ ID NO: 66496 - DNA, 22 bp, Homo Sapiens
gtttatgtagcttacctcctca

SEQ ID NO: 66497 - DNA, 24 bp, Homo Sapiens
gtttatgtagcttacctcctcaaa

SEQ ID NO: 66498 - DNA, 16 bp, Homo Sapiens
gtttccccgcgcaggt

SEQ ID NO: 66499 - DNA, 19 bp, Homo Sapiens
gtttccgtagtggagtggt

SEQ ID NO: 66500 - DNA, 16 bp, Homo Sapiens
gtttccgtagtgtagc

SEQ ID NO: 66501 - DNA, 18 bp, Homo Sapiens
gtttccgtagtgtagcgg

SEQ ID NO: 66502 - DNA, 19 bp, Homo Sapiens
gtttccgtagtgtagcggt

SEQ ID NO: 66503 - DNA, 20 bp, Homo Sapiens
gtttccgtagtgtagcggtt

SEQ ID NO: 66504 - DNA, 21 bp, Homo Sapiens
gtttccgtagtgtagcggtta

SEQ ID NO: 66505 - DNA, 22 bp, Homo Sapiens
gtttccgtagtgtagcggttat

SEQ ID NO: 66506 - DNA, 23 bp, Homo Sapiens
gtttccgtagtgtagcggttatc

SEQ ID NO: 66507 - DNA, 16 bp, Homo Sapiens
gtttccgtagtgtagt

SEQ ID NO: 66508 - DNA, 17 bp, Homo Sapiens
gtttccgtagtgtagtg

SEQ ID NO: 66509 - DNA, 18 bp, Homo Sapiens
gtttccgtagtgtagtgg

SEQ ID NO: 66510 - DNA, 19 bp, Homo Sapiens
gtttccgtagtgtagtggt

SEQ ID NO: 66511 - DNA, 20 bp, Homo Sapiens
gtttccgtagtgtagtggtc

SEQ ID NO: 66512 - DNA, 22 bp, Homo Sapiens
gtttccgtagtgtagtggtcat

SEQ ID NO: 66513 - DNA, 23 bp, Homo Sapiens
gtttccgtagtgtagtggtcatc

SEQ ID NO: 66514 - DNA, 20 bp, Homo Sapiens
gtttccgtagtgtagtggtt

SEQ ID NO: 66515 - DNA, 21 bp, Homo Sapiens
gtttccgtagtgtagtggtta

SEQ ID NO: 66516 - DNA, 22 bp, Homo Sapiens
gtttccgtagtgtagtggttat

SEQ ID NO: 66517 - DNA, 23 bp, Homo Sapiens
gtttccgtagtgtagtggttatc

SEQ ID NO: 66518 - DNA, 24 bp, Homo Sapiens
gtttccgtagtgtagtggttatca

SEQ ID NO: 66519 - DNA, 19 bp, Homo Sapiens
gtttccgtggtgtagtggt

SEQ ID NO: 66520 - DNA, 18 bp, Homo Sapiens
gtttgtgggtttaagtcc

SEQ ID NO: 66521 - DNA, 19 bp, Homo Sapiens
gtttgtgggtttaagtccc

SEQ ID NO: 66522 - DNA, 20 bp, Homo Sapiens
gtttgtgggtttaagtccca

SEQ ID NO: 66523 - DNA, 22 bp, Homo Sapiens
gtttgtgggtttaagtcccatt

SEQ ID NO: 66524 - DNA, 18 bp, Homo Sapiens
gttttgcagtccttacca

SEQ ID NO: 66525 - DNA, 17 bp, Homo Sapiens
gtttttcatatcattgg

SEQ ID NO: 66526 - DNA, 18 bp, Homo Sapiens
gtttttcatatcattggt

SEQ ID NO: 66527 - DNA, 19 bp, Homo Sapiens
gtttttcatatcattggtc

SEQ ID NO: 66528 - DNA, 20 bp, Homo Sapiens
gtttttcatatcattggtcg

SEQ ID NO: 66529 - DNA, 21 bp, Homo Sapiens
gtttttcatatcattggtcgt

SEQ ID NO: 66530 - DNA, 19 bp, Homo Sapiens
taaaacttaaaactttaca

SEQ ID NO: 66531 - DNA, 20 bp, Homo Sapiens
taaaacttaaaactttacag

SEQ ID NO: 66532 - DNA, 21 bp, Homo Sapiens
taaacaggagatcctgggttc

SEQ ID NO: 66533 - DNA, 22 bp, Homo Sapiens
taaacaggagatcctgggttcg

SEQ ID NO: 66534 - DNA, 23 bp, Homo Sapiens
taaacaggagatcctgggttcga

SEQ ID NO: 66535 - DNA, 19 bp, Homo Sapiens
taaacccccttatttctac

SEQ ID NO: 66536 - DNA, 20 bp, Homo Sapiens
taaacccccttatttctacc

SEQ ID NO: 66537 - DNA, 21 bp, Homo Sapiens
taaacccccttatttctacca

SEQ ID NO: 66538 - DNA, 23 bp, Homo Sapiens
taaaccgaagatcacgggttcga

SEQ ID NO: 66539 - DNA, 23 bp, Homo Sapiens
taaaccgaagatcgcgggttcga

SEQ ID NO: 66540 - DNA, 18 bp, Homo Sapiens
taaaccggagatgaaaac

SEQ ID NO: 66541 - DNA, 19 bp, Homo Sapiens
taaaccggagatgaaaacc

SEQ ID NO: 66542 - DNA, 20 bp, Homo Sapiens
taaaccggagatgaaaacct

SEQ ID NO: 66543 - DNA, 21 bp, Homo Sapiens
taaaccggagatgaaaacctt

SEQ ID NO: 66544 - DNA, 18 bp, Homo Sapiens
taaagactttttctctga

SEQ ID NO: 66545 - DNA, 19 bp, Homo Sapiens
taaagactttttctctgac

SEQ ID NO: 66546 - DNA, 20 bp, Homo Sapiens
taaagactttttctctgacc

SEQ ID NO: 66547 - DNA, 21 bp, Homo Sapiens
taaagactttttctctgacca

SEQ ID NO: 66548 - DNA, 16 bp, Homo Sapiens
taaagattaagagaac

SEQ ID NO: 66549 - DNA, 17 bp, Homo Sapiens
taaagattaagagaacc

SEQ ID NO: 66550 - DNA, 18 bp, Homo Sapiens
taaagattaagagaacca

SEQ ID NO: 66551 - DNA, 19 bp, Homo Sapiens
taaagattaagagaaccaa

SEQ ID NO: 66552 - DNA, 20 bp, Homo Sapiens
taaagattaagagaaccaac

SEQ ID NO: 66553 - DNA, 21 bp, Homo Sapiens
taaagattaagagaaccaaca

SEQ ID NO: 66554 - DNA, 17 bp, Homo Sapiens
taaagtggctgatttgc

SEQ ID NO: 66555 - DNA, 16 bp, Homo Sapiens
taaataagctatcggg

SEQ ID NO: 66556 - DNA, 17 bp, Homo Sapiens
taaataagctatcgggc

SEQ ID NO: 66557 - DNA, 18 bp, Homo Sapiens
taaataagctatcgggcc

SEQ ID NO: 66558 - DNA, 19 bp, Homo Sapiens
taaataagctatcgggccc

SEQ ID NO: 66559 - DNA, 20 bp, Homo Sapiens
taaataagctatcgggccca

SEQ ID NO: 66560 - DNA, 21 bp, Homo Sapiens
taaataagctatcgggcccat

SEQ ID NO: 66561 - DNA, 18 bp, Homo Sapiens
taaataataggagcttaa

SEQ ID NO: 66562 - DNA, 22 bp, Homo Sapiens
taaataataggagcttaaaccc

SEQ ID NO: 66563 - DNA, 18 bp, Homo Sapiens
taaatacagaccaagagc

SEQ ID NO: 66564 - DNA, 22 bp, Homo Sapiens
taaatacagaccaagagccttc

SEQ ID NO: 66565 - DNA, 23 bp, Homo Sapiens
taaatacagaccaagagccttca

SEQ ID NO: 66566 - DNA, 20 bp, Homo Sapiens
taaatagtaccgttaacttc

SEQ ID NO: 66567 - DNA, 21 bp, Homo Sapiens
taaatagtaccgttaacttcc

SEQ ID NO: 66568 - DNA, 21 bp, Homo Sapiens
taaatcctatatatcttacca

SEQ ID NO: 66569 - DNA, 19 bp, Homo Sapiens
taacaacatggctttctca

SEQ ID NO: 66570 - DNA, 21 bp, Homo Sapiens
taacaacatggctttctcacc

SEQ ID NO: 66571 - DNA, 22 bp, Homo Sapiens
taacaacatggctttctcacca

SEQ ID NO: 66572 - DNA, 19 bp, Homo Sapiens
taacacaaagcacccaact

SEQ ID NO: 66573 - DNA, 16 bp, Homo Sapiens
taaccaaaacatcaga

SEQ ID NO: 66574 - DNA, 20 bp, Homo Sapiens
taaccaaaacatcagattgt

SEQ ID NO: 66575 - DNA, 19 bp, Homo Sapiens
taacccagaggtcgatgga

SEQ ID NO: 66576 - DNA, 20 bp, Homo Sapiens
taacccagaggtcgatggat

SEQ ID NO: 66577 - DNA, 22 bp, Homo Sapiens
taacccagaggtcgatggatcg

SEQ ID NO: 66578 - DNA, 23 bp, Homo Sapiens
taacccagaggtcgatggatcga

SEQ ID NO: 66579 - DNA, 22 bp, Homo Sapiens
taacgccaaggtcgcgggttcg

SEQ ID NO: 66580 - DNA, 23 bp, Homo Sapiens
taacgccaaggtcgcgggttcga

SEQ ID NO: 66581 - DNA, 24 bp, Homo Sapiens
taacgccaaggtcgcgggttcgat

SEQ ID NO: 66582 - DNA, 17 bp, Homo Sapiens
taactagttttgacaac

SEQ ID NO: 66583 - DNA, 16 bp, Homo Sapiens
taacttgaccgctctg

SEQ ID NO: 66584 - DNA, 17 bp, Homo Sapiens
taacttgaccgctctga

SEQ ID NO: 66585 - DNA, 18 bp, Homo Sapiens
taacttgaccgctctgac

SEQ ID NO: 66586 - DNA, 19 bp, Homo Sapiens
taacttgaccgctctgacc

SEQ ID NO: 66587 - DNA, 20 bp, Homo Sapiens
taacttgaccgctctgacca

SEQ ID NO: 66588 - DNA, 19 bp, Homo Sapiens
taagagaaccaacacctct

SEQ ID NO: 66589 - DNA, 16 bp, Homo Sapiens
taagatggcagagccc

SEQ ID NO: 66590 - DNA, 21 bp, Homo Sapiens
taagatggcagagcccggtaa

SEQ ID NO: 66591 - DNA, 22 bp, Homo Sapiens
taagatggcagagcccggtaat

SEQ ID NO: 66592 - DNA, 17 bp, Homo Sapiens
taagccagggattgtgg

SEQ ID NO: 66593 - DNA, 19 bp, Homo Sapiens
taagccagggattgtgggt

SEQ ID NO: 66594 - DNA, 20 bp, Homo Sapiens
taagccagggattgtgggtt

SEQ ID NO: 66595 - DNA, 21 bp, Homo Sapiens
taagccagggattgtgggttc

SEQ ID NO: 66596 - DNA, 16 bp, Homo Sapiens
taagctatcgggccca

SEQ ID NO: 66597 - DNA, 17 bp, Homo Sapiens
taagctatcgggcccat

SEQ ID NO: 66598 - DNA, 18 bp, Homo Sapiens
taagctatcgggcccata

SEQ ID NO: 66599 - DNA, 19 bp, Homo Sapiens
taagctatcgggcccatac

SEQ ID NO: 66600 - DNA, 20 bp, Homo Sapiens
taagctatcgggcccatacc

SEQ ID NO: 66601 - DNA, 23 bp, Homo Sapiens
taagctatcgggcccataccccg

SEQ ID NO: 66602 - DNA, 24 bp, Homo Sapiens
taagctatcgggcccataccccga

SEQ ID NO: 66603 - DNA, 25 bp, Homo Sapiens
taagctatcgggcccataccccgaa

SEQ ID NO: 66604 - DNA, 16 bp, Homo Sapiens
taaggtcagctaaata

SEQ ID NO: 66605 - DNA, 18 bp, Homo Sapiens
taaggtcagctaaataag

SEQ ID NO: 66606 - DNA, 19 bp, Homo Sapiens
taaggtcagctaaataagc

SEQ ID NO: 66607 - DNA, 20 bp, Homo Sapiens
taagtcccattggtctagcc

SEQ ID NO: 66608 - DNA, 19 bp, Homo Sapiens
taagttaaagattaagaga

SEQ ID NO: 66609 - DNA, 22 bp, Homo Sapiens
taagttaaagattaagagaacc

SEQ ID NO: 66610 - DNA, 16 bp, Homo Sapiens
taataggagcttaaac

SEQ ID NO: 66611 - DNA, 17 bp, Homo Sapiens
taataggagcttaaacc

SEQ ID NO: 66612 - DNA, 18 bp, Homo Sapiens
taataggagcttaaaccc

SEQ ID NO: 66613 - DNA, 19 bp, Homo Sapiens
taataggagcttaaacccc

SEQ ID NO: 66614 - DNA, 20 bp, Homo Sapiens
taataggagcttaaaccccc

SEQ ID NO: 66615 - DNA, 18 bp, Homo Sapiens
taatcatatttaccaacc

SEQ ID NO: 66616 - DNA, 19 bp, Homo Sapiens
taatcatatttaccaacca

SEQ ID NO: 66617 - DNA, 19 bp, Homo Sapiens
taatccattgtgctttgca

SEQ ID NO: 66618 - DNA, 21 bp, Homo Sapiens
taatccattgtgctttgcacg

SEQ ID NO: 66619 - DNA, 22 bp, Homo Sapiens
taatccattgtgctttgcacgc

SEQ ID NO: 66620 - DNA, 23 bp, Homo Sapiens
taatccattgtgctttgcacgcg

SEQ ID NO: 66621 - DNA, 24 bp, Homo Sapiens
taatccattgtgctttgcacgcgt

SEQ ID NO: 66622 - DNA, 17 bp, Homo Sapiens
taatctgaaggtcgtga

SEQ ID NO: 66623 - DNA, 21 bp, Homo Sapiens
taatgccgaggttgtgagttc

SEQ ID NO: 66624 - DNA, 23 bp, Homo Sapiens
taatgccgaggttgtgagttcga

SEQ ID NO: 66625 - DNA, 17 bp, Homo Sapiens
taatggataaggcactg

SEQ ID NO: 66626 - DNA, 16 bp, Homo Sapiens
taatggataaggcatc

SEQ ID NO: 66627 - DNA, 17 bp, Homo Sapiens
taatggataaggcatca

SEQ ID NO: 66628 - DNA, 17 bp, Homo Sapiens
taatggataaggcattg

SEQ ID NO: 66629 - DNA, 19 bp, Homo Sapiens
taatggtggagttaaagac

SEQ ID NO: 66630 - DNA, 20 bp, Homo Sapiens
taatggtggagttaaagact

SEQ ID NO: 66631 - DNA, 18 bp, Homo Sapiens
taattaaagtggctgatt

SEQ ID NO: 66632 - DNA, 21 bp, Homo Sapiens
taattaaagtggctgatttgc

SEQ ID NO: 66633 - DNA, 16 bp, Homo Sapiens
tacaacgatggttttt

SEQ ID NO: 66634 - DNA, 18 bp, Homo Sapiens
tacaacgatggtttttca

SEQ ID NO: 66635 - DNA, 19 bp, Homo Sapiens
tacaacgatggtttttcat

SEQ ID NO: 66636 - DNA, 23 bp, Homo Sapiens
tacaacgatggtttttcatatca

SEQ ID NO: 66637 - DNA, 17 bp, Homo Sapiens
tacacttaggagatttc

SEQ ID NO: 66638 - DNA, 18 bp, Homo Sapiens
tacacttaggagatttca

SEQ ID NO: 66639 - DNA, 20 bp, Homo Sapiens
tacacttaggagatttcaac

SEQ ID NO: 66640 - DNA, 21 bp, Homo Sapiens
tacacttaggagatttcaact

SEQ ID NO: 66641 - DNA, 18 bp, Homo Sapiens
tacagaccaagagccttc

SEQ ID NO: 66642 - DNA, 19 bp, Homo Sapiens
tacagaccaagagccttca

SEQ ID NO: 66643 - DNA, 16 bp, Homo Sapiens
tacagtcagaggttca

SEQ ID NO: 66644 - DNA, 24 bp, Homo Sapiens
tacagtcagaggttcaattcctct

SEQ ID NO: 66645 - DNA, 17 bp, Homo Sapiens
tacccttcccgtactac

SEQ ID NO: 66646 - DNA, 18 bp, Homo Sapiens
tacccttcccgtactacc

SEQ ID NO: 66647 - DNA, 19 bp, Homo Sapiens
tacccttcccgtactacca

SEQ ID NO: 66648 - DNA, 18 bp, Homo Sapiens
tacctcctcaaagcaata

SEQ ID NO: 66649 - DNA, 20 bp, Homo Sapiens
tacctcctcaaagcaataca

SEQ ID NO: 66650 - DNA, 19 bp, Homo Sapiens
tacgaccccttatttaccc

SEQ ID NO: 66651 - DNA, 20 bp, Homo Sapiens
tacgaccccttatttacccc

SEQ ID NO: 66652 - DNA, 21 bp, Homo Sapiens
tacgaccccttatttacccca

SEQ ID NO: 66653 - DNA, 16 bp, Homo Sapiens
tacttaatttctgcca

SEQ ID NO: 66654 - DNA, 17 bp, Homo Sapiens
tagaatcttagctttgg

SEQ ID NO: 66655 - DNA, 24 bp, Homo Sapiens
tagaatcttagctttgggtgctaa

SEQ ID NO: 66656 - DNA, 25 bp, Homo Sapiens
tagaatcttagctttgggtgctaat

SEQ ID NO: 66657 - DNA, 17 bp, Homo Sapiens
tagaattctcgcctgcc

SEQ ID NO: 66658 - DNA, 19 bp, Homo Sapiens
tagaattctcgcctgccac

SEQ ID NO: 66659 - DNA, 20 bp, Homo Sapiens
tagaattctcgcctgccacg

SEQ ID NO: 66660 - DNA, 21 bp, Homo Sapiens
tagaattctcgcctgccacgc

SEQ ID NO: 66661 - DNA, 16 bp, Homo Sapiens
tagacgggctcacatc

SEQ ID NO: 66662 - DNA, 17 bp, Homo Sapiens
tagacgggctcacatca

SEQ ID NO: 66663 - DNA, 18 bp, Homo Sapiens
tagacgggctcacatcac

SEQ ID NO: 66664 - DNA, 19 bp, Homo Sapiens
tagacgggctcacatcacc

SEQ ID NO: 66665 - DNA, 20 bp, Homo Sapiens
tagacgggctcacatcaccc

SEQ ID NO: 66666 - DNA, 21 bp, Homo Sapiens
tagacgggctcacatcacccc

SEQ ID NO: 66667 - DNA, 22 bp, Homo Sapiens
tagacgggctcacatcacccca

SEQ ID NO: 66668 - DNA, 25 bp, Homo Sapiens
tagacgggctcacatcaccccataa

SEQ ID NO: 66669 - DNA, 17 bp, Homo Sapiens
tagagcatgagactctt

SEQ ID NO: 66670 - DNA, 17 bp, Homo Sapiens
tagagcatgggactctt

SEQ ID NO: 66671 - DNA, 22 bp, Homo Sapiens
tagagccagactgcctgggttt

SEQ ID NO: 66672 - DNA, 17 bp, Homo Sapiens
tagagtaaataatagga

SEQ ID NO: 66673 - DNA, 19 bp, Homo Sapiens
tagagtaaataataggagc

SEQ ID NO: 66674 - DNA, 17 bp, Homo Sapiens
tagattgaagccagttg

SEQ ID NO: 66675 - DNA, 18 bp, Homo Sapiens
tagattgaagccagttga

SEQ ID NO: 66676 - DNA, 17 bp, Homo Sapiens
tagcattaaccttttaa

SEQ ID NO: 66677 - DNA, 18 bp, Homo Sapiens
tagcattaaccttttaag

SEQ ID NO: 66678 - DNA, 19 bp, Homo Sapiens
tagcattaaccttttaagt

SEQ ID NO: 66679 - DNA, 20 bp, Homo Sapiens
tagcattaaccttttaagtt

SEQ ID NO: 66680 - DNA, 21 bp, Homo Sapiens
tagcattaaccttttaagtta

SEQ ID NO: 66681 - DNA, 16 bp, Homo Sapiens
tagctcagtcggtaga

SEQ ID NO: 66682 - DNA, 18 bp, Homo Sapiens
tagctcagtcggtagagc

SEQ ID NO: 66683 - DNA, 25 bp, Homo Sapiens
tagctcagtcggtagagcatgggac

SEQ ID NO: 66684 - DNA, 16 bp, Homo Sapiens
taggagatttcaactt

SEQ ID NO: 66685 - DNA, 17 bp, Homo Sapiens
taggagatttcaactta

SEQ ID NO: 66686 - DNA, 18 bp, Homo Sapiens
taggagatttcaacttaa

SEQ ID NO: 66687 - DNA, 19 bp, Homo Sapiens
taggagatttcaacttaac

SEQ ID NO: 66688 - DNA, 20 bp, Homo Sapiens
taggagatttcaacttaact

SEQ ID NO: 66689 - DNA, 21 bp, Homo Sapiens
taggagatttcaacttaactt

SEQ ID NO: 66690 - DNA, 25 bp, Homo Sapiens
taggagatttcaacttaacttgacc

SEQ ID NO: 66691 - DNA, 16 bp, Homo Sapiens
taggagcttaaacccc

SEQ ID NO: 66692 - DNA, 17 bp, Homo Sapiens
taggagcttaaaccccc

SEQ ID NO: 66693 - DNA, 20 bp, Homo Sapiens
taggagcttaaaccccctta

SEQ ID NO: 66694 - DNA, 16 bp, Homo Sapiens
taggatggggtgtgat

SEQ ID NO: 66695 - DNA, 17 bp, Homo Sapiens
taggatggggtgtgata

SEQ ID NO: 66696 - DNA, 18 bp, Homo Sapiens
taggatggggtgtgatag

SEQ ID NO: 66697 - DNA, 19 bp, Homo Sapiens
taggatggggtgtgatagg

SEQ ID NO: 66698 - DNA, 20 bp, Homo Sapiens
taggatggggtgtgataggt

SEQ ID NO: 66699 - DNA, 21 bp, Homo Sapiens
taggatggggtgtgataggtg

SEQ ID NO: 66700 - DNA, 22 bp, Homo Sapiens
taggatggggtgtgataggtgg

SEQ ID NO: 66701 - DNA, 23 bp, Homo Sapiens
taggatggggtgtgataggtggc

SEQ ID NO: 66702 - DNA, 24 bp, Homo Sapiens
taggatggggtgtgataggtggca

SEQ ID NO: 66703 - DNA, 17 bp, Homo Sapiens
taggattcctggttttc

SEQ ID NO: 66704 - DNA, 16 bp, Homo Sapiens
taggattcggcgctct

SEQ ID NO: 66705 - DNA, 17 bp, Homo Sapiens
taggattcggcgctctc

SEQ ID NO: 66706 - DNA, 17 bp, Homo Sapiens
taggattcggcgctttc

SEQ ID NO: 66707 - DNA, 20 bp, Homo Sapiens
taggcctctttttaccacca

SEQ ID NO: 66708 - DNA, 18 bp, Homo Sapiens
taggggtatgattctcgc

SEQ ID NO: 66709 - DNA, 19 bp, Homo Sapiens
taggggtatgattctcgct

SEQ ID NO: 66710 - DNA, 20 bp, Homo Sapiens
taggggtatgattctcgctt

SEQ ID NO: 66711 - DNA, 23 bp, Homo Sapiens
taggggtatgattctcggtttgg

SEQ ID NO: 66712 - DNA, 20 bp, Homo Sapiens
taggtggcacggagaatttt

SEQ ID NO: 66713 - DNA, 17 bp, Homo Sapiens
tagtaccgttaacttcc

SEQ ID NO: 66714 - DNA, 21 bp, Homo Sapiens
tagtaccgttaacttccaatt

SEQ ID NO: 66715 - DNA, 22 bp, Homo Sapiens
tagtaccgttaacttccaatta

SEQ ID NO: 66716 - DNA, 16 bp, Homo Sapiens
tagtactctgcgttgt

SEQ ID NO: 66717 - DNA, 17 bp, Homo Sapiens
tagtccgtgcgagaata

SEQ ID NO: 66718 - DNA, 18 bp, Homo Sapiens
tagtccgtgcgagaatac

SEQ ID NO: 66719 - DNA, 19 bp, Homo Sapiens
tagtccgtgcgagaatacc

SEQ ID NO: 66720 - DNA, 20 bp, Homo Sapiens
tagtccgtgcgagaatacca

SEQ ID NO: 66721 - DNA, 20 bp, Homo Sapiens
tagtggtatcatgcaagatt

SEQ ID NO: 66722 - DNA, 19 bp, Homo Sapiens
tagtggtgagtatccccgc

SEQ ID NO: 66723 - DNA, 18 bp, Homo Sapiens
tagtggttaggattcggc

SEQ ID NO: 66724 - DNA, 20 bp, Homo Sapiens
tagtggttaggattcggcgc

SEQ ID NO: 66725 - DNA, 21 bp, Homo Sapiens
tagtggttaggattcggcgct

SEQ ID NO: 66726 - DNA, 22 bp, Homo Sapiens
tagtggttaggattcggcgctc

SEQ ID NO: 66727 - DNA, 18 bp, Homo Sapiens
tagtggttagtactctgc

SEQ ID NO: 66728 - DNA, 19 bp, Homo Sapiens
tagtggttagtactctgcg

SEQ ID NO: 66729 - DNA, 21 bp, Homo Sapiens
tagtttaaccaaaacatcaga

SEQ ID NO: 66730 - DNA, 19 bp, Homo Sapiens
tatacccttcccgtactac

SEQ ID NO: 66731 - DNA, 20 bp, Homo Sapiens
tatacccttcccgtactacc

SEQ ID NO: 66732 - DNA, 21 bp, Homo Sapiens
tatacccttcccgtactacca

SEQ ID NO: 66733 - DNA, 18 bp, Homo Sapiens
tatagtggtgagtatccc

SEQ ID NO: 66734 - DNA, 20 bp, Homo Sapiens
tatagtggttagtactctgc

SEQ ID NO: 66735 - DNA, 21 bp, Homo Sapiens
tatagtggttagtactctgcg

SEQ ID NO: 66736 - DNA, 22 bp, Homo Sapiens
tatagtggttagtactctgcgt

SEQ ID NO: 66737 - DNA, 23 bp, Homo Sapiens
tatagtggttagtactctgcgtt

SEQ ID NO: 66738 - DNA, 23 bp, Homo Sapiens
tatagtttaaccaaaacatcaga

SEQ ID NO: 66739 - DNA, 19 bp, Homo Sapiens
tatcattggtcgtggttgt

SEQ ID NO: 66740 - DNA, 20 bp, Homo Sapiens
tatcattggtcgtggttgta

SEQ ID NO: 66741 - DNA, 23 bp, Homo Sapiens
tatcattggtcgtggttgtagtc

SEQ ID NO: 66742 - DNA, 24 bp, Homo Sapiens
tatcattggtcgtggttgtagtcc

SEQ ID NO: 66743 - DNA, 19 bp, Homo Sapiens
tatccattggtcttaggcc

SEQ ID NO: 66744 - DNA, 16 bp, Homo Sapiens
tatcgggcccataccc

SEQ ID NO: 66745 - DNA, 17 bp, Homo Sapiens
tatcgggcccatacccc

SEQ ID NO: 66746 - DNA, 18 bp, Homo Sapiens
tatcgggcccataccccg

SEQ ID NO: 66747 - DNA, 19 bp, Homo Sapiens
tatcgggcccataccccga

SEQ ID NO: 66748 - DNA, 20 bp, Homo Sapiens
tatcgggcccataccccgaa

SEQ ID NO: 66749 - DNA, 21 bp, Homo Sapiens
tatcgggcccataccccgaaa

SEQ ID NO: 66750 - DNA, 19 bp, Homo Sapiens
tatgataatcatatttacc

SEQ ID NO: 66751 - DNA, 20 bp, Homo Sapiens
tatgataatcatatttacca

SEQ ID NO: 66752 - DNA, 22 bp, Homo Sapiens
tatgataatcatatttaccaac

SEQ ID NO: 66753 - DNA, 23 bp, Homo Sapiens
tatgataatcatatttaccaacc

SEQ ID NO: 66754 - DNA, 24 bp, Homo Sapiens
tatgataatcatatttaccaacca

SEQ ID NO: 66755 - DNA, 17 bp, Homo Sapiens
tatgattctcggtttgg

SEQ ID NO: 66756 - DNA, 16 bp, Homo Sapiens
tcaaaaaagagtacca

SEQ ID NO: 66757 - DNA, 18 bp, Homo Sapiens
tcaaacctgccggggctt

SEQ ID NO: 66758 - DNA, 19 bp, Homo Sapiens
tcaaacctgccggggcttc

SEQ ID NO: 66759 - DNA, 20 bp, Homo Sapiens
tcaaacctgccggggcttcc

SEQ ID NO: 66760 - DNA, 17 bp, Homo Sapiens
tcaaagcaatacactga

SEQ ID NO: 66761 - DNA, 18 bp, Homo Sapiens
tcaaagcaatacactgaa

SEQ ID NO: 66762 - DNA, 17 bp, Homo Sapiens
tcaaagttaaattatag

SEQ ID NO: 66763 - DNA, 18 bp, Homo Sapiens
tcaaagttaaattatagg

SEQ ID NO: 66764 - DNA, 20 bp, Homo Sapiens
tcaaagttaaattataggct

SEQ ID NO: 66765 - DNA, 21 bp, Homo Sapiens
tcaaatcccggacgagccccc

SEQ ID NO: 66766 - DNA, 21 bp, Homo Sapiens
tcaaatctcggtggaacctcc

SEQ ID NO: 66767 - DNA, 22 bp, Homo Sapiens
tcaaatctcggtggaacctcca

SEQ ID NO: 66768 - DNA, 19 bp, Homo Sapiens
tcaacttaacttgaccgct

SEQ ID NO: 66769 - DNA, 20 bp, Homo Sapiens
tcaacttaacttgaccgctc

SEQ ID NO: 66770 - DNA, 21 bp, Homo Sapiens
tcaacttaacttgaccgctct

SEQ ID NO: 66771 - DNA, 23 bp, Homo Sapiens
tcaacttaacttgaccgctctga

SEQ ID NO: 66772 - DNA, 24 bp, Homo Sapiens
tcaacttaacttgaccgctctgac

SEQ ID NO: 66773 - DNA, 25 bp, Homo Sapiens
tcaacttaacttgaccgctctgacc

SEQ ID NO: 66774 - DNA, 19 bp, Homo Sapiens
tcaagttctggtctccgga

SEQ ID NO: 66775 - DNA, 16 bp, Homo Sapiens
tcacaagaactgctaa

SEQ ID NO: 66776 - DNA, 17 bp, Homo Sapiens
tcacaagaactgctaac

SEQ ID NO: 66777 - DNA, 18 bp, Homo Sapiens
tcacaagaactgctaact

SEQ ID NO: 66778 - DNA, 19 bp, Homo Sapiens
tcacaagaactgctaactc

SEQ ID NO: 66779 - DNA, 20 bp, Homo Sapiens
tcacaagaactgctaactca

SEQ ID NO: 66780 - DNA, 22 bp, Homo Sapiens
tcacaagaactgctaactcatg

SEQ ID NO: 66781 - DNA, 23 bp, Homo Sapiens
tcacaagaactgctaactcatgc

SEQ ID NO: 66782 - DNA, 16 bp, Homo Sapiens
tcacatcaccccataa

SEQ ID NO: 66783 - DNA, 17 bp, Homo Sapiens
tcacatcaccccataaa

SEQ ID NO: 66784 - DNA, 18 bp, Homo Sapiens
tcacatcaccccataaac

SEQ ID NO: 66785 - DNA, 19 bp, Homo Sapiens
tcacatcaccccataaaca

SEQ ID NO: 66786 - DNA, 20 bp, Homo Sapiens
tcacatcaccccataaacac

SEQ ID NO: 66787 - DNA, 21 bp, Homo Sapiens
tcacatcaccccataaacacc

SEQ ID NO: 66788 - DNA, 22 bp, Homo Sapiens
tcacatcaccccataaacacca

SEQ ID NO: 66789 - DNA, 16 bp, Homo Sapiens
tcaccccataaacacc

SEQ ID NO: 66790 - DNA, 17 bp, Homo Sapiens
tcaccccataaacacca

SEQ ID NO: 66791 - DNA, 16 bp, Homo Sapiens
tcacgtcggggtcacc

SEQ ID NO: 66792 - DNA, 17 bp, Homo Sapiens
tcacgtcggggtcacca

SEQ ID NO: 66793 - DNA, 16 bp, Homo Sapiens
tcagaggttcaattcc

SEQ ID NO: 66794 - DNA, 19 bp, Homo Sapiens
tcagaggttcaattcctct

SEQ ID NO: 66795 - DNA, 18 bp, Homo Sapiens
tcagattgtgaatctgac

SEQ ID NO: 66796 - DNA, 19 bp, Homo Sapiens
tcagattgtgaatctgaca

SEQ ID NO: 66797 - DNA, 21 bp, Homo Sapiens
tcagattgtgaatctgacaac

SEQ ID NO: 66798 - DNA, 22 bp, Homo Sapiens
tcagattgtgaatctgacaaca

SEQ ID NO: 66799 - DNA, 17 bp, Homo Sapiens
tcagtaagttgcaatac

SEQ ID NO: 66800 - DNA, 18 bp, Homo Sapiens
tcagtaagttgcaatact

SEQ ID NO: 66801 - DNA, 17 bp, Homo Sapiens
tcagtcggtagagcatc

SEQ ID NO: 66802 - DNA, 18 bp, Homo Sapiens
tcagtcggtagagcatca

SEQ ID NO: 66803 - DNA, 19 bp, Homo Sapiens
tcagtcggtagagcatcag

SEQ ID NO: 66804 - DNA, 20 bp, Homo Sapiens
tcagtcggtagagcatcaga

SEQ ID NO: 66805 - DNA, 21 bp, Homo Sapiens
tcagtcggtagagcatcagac

SEQ ID NO: 66806 - DNA, 22 bp, Homo Sapiens
tcagtcggtagagcatcagact

SEQ ID NO: 66807 - DNA, 18 bp, Homo Sapiens
tcagtcggtagagcatga

SEQ ID NO: 66808 - DNA, 19 bp, Homo Sapiens
tcagtcggtagagcatgag

SEQ ID NO: 66809 - DNA, 20 bp, Homo Sapiens
tcagtcggtagagcatgaga

SEQ ID NO: 66810 - DNA, 21 bp, Homo Sapiens
tcagtcggtagagcatgagac

SEQ ID NO: 66811 - DNA, 22 bp, Homo Sapiens
tcagtcggtagagcatgagact

SEQ ID NO: 66812 - DNA, 23 bp, Homo Sapiens
tcagtcggtagagcatgagactc

SEQ ID NO: 66813 - DNA, 24 bp, Homo Sapiens
tcagtcggtagagcatgagactct

SEQ ID NO: 66814 - DNA, 18 bp, Homo Sapiens
tcagtcggtagagcatgg

SEQ ID NO: 66815 - DNA, 20 bp, Homo Sapiens
tcagtcggtagagcatggga

SEQ ID NO: 66816 - DNA, 21 bp, Homo Sapiens
tcagtcggtagagcatgggac

SEQ ID NO: 66817 - DNA, 22 bp, Homo Sapiens
tcagtcggtagagcatgggact

SEQ ID NO: 66818 - DNA, 23 bp, Homo Sapiens
tcagtcggtagagcatgggactc

SEQ ID NO: 66819 - DNA, 24 bp, Homo Sapiens
tcagtcggtagagcatgggactct

SEQ ID NO: 66820 - DNA, 19 bp, Homo Sapiens
tcagtggtagaattctcgc

SEQ ID NO: 66821 - DNA, 20 bp, Homo Sapiens
tcagtggtagaattctcgcc

SEQ ID NO: 66822 - DNA, 21 bp, Homo Sapiens
tcagtggtagaattctcgcct

SEQ ID NO: 66823 - DNA, 23 bp, Homo Sapiens
tcagtggtagaattctcgcctgc

SEQ ID NO: 66824 - DNA, 19 bp, Homo Sapiens
tcagtggtagagcatttga

SEQ ID NO: 66825 - DNA, 16 bp, Homo Sapiens
tcatatttaccaacca

SEQ ID NO: 66826 - DNA, 20 bp, Homo Sapiens
tcatgcccccatgtctaaca

SEQ ID NO: 66827 - DNA, 21 bp, Homo Sapiens
tcattggtcgtggttgtagtc

SEQ ID NO: 66828 - DNA, 17 bp, Homo Sapiens
tccaaataaaagtacca

SEQ ID NO: 66829 - DNA, 17 bp, Homo Sapiens
tccagcgatccgagttc

SEQ ID NO: 66830 - DNA, 20 bp, Homo Sapiens
tccaggttcgactcctggct

SEQ ID NO: 66831 - DNA, 17 bp, Homo Sapiens
tccattggtcttaggcc

SEQ ID NO: 66832 - DNA, 16 bp, Homo Sapiens
tcccacatggtctagc

SEQ ID NO: 66833 - DNA, 17 bp, Homo Sapiens
tcccacatggtctagcg

SEQ ID NO: 66834 - DNA, 18 bp, Homo Sapiens
tcccacatggtctagcgg

SEQ ID NO: 66835 - DNA, 19 bp, Homo Sapiens
tcccacatggtctagcggt

SEQ ID NO: 66836 - DNA, 20 bp, Homo Sapiens
tcccacatggtctagcggtt

SEQ ID NO: 66837 - DNA, 22 bp, Homo Sapiens
tcccacatggtctagcggttag

SEQ ID NO: 66838 - DNA, 23 bp, Homo Sapiens
tcccacatggtctagcggttagg

SEQ ID NO: 66839 - DNA, 24 bp, Homo Sapiens
tcccacatggtctagcggttagga

SEQ ID NO: 66840 - DNA, 25 bp, Homo Sapiens
tcccacatggtctagcggttaggat

SEQ ID NO: 66841 - DNA, 18 bp, Homo Sapiens
tcccacccagggacgcca

SEQ ID NO: 66842 - DNA, 16 bp, Homo Sapiens
tcccaccgctgccacc

SEQ ID NO: 66843 - DNA, 17 bp, Homo Sapiens
tcccaccgctgccacca

SEQ ID NO: 66844 - DNA, 16 bp, Homo Sapiens
tcccactcctgacacc

SEQ ID NO: 66845 - DNA, 17 bp, Homo Sapiens
tcccactcctgacacca

SEQ ID NO: 66846 - DNA, 16 bp, Homo Sapiens
tcccacttctgacacc

SEQ ID NO: 66847 - DNA, 17 bp, Homo Sapiens
tcccacttctgacacca

SEQ ID NO: 66848 - DNA, 16 bp, Homo Sapiens
tcccagcggggcctcc

SEQ ID NO: 66849 - DNA, 17 bp, Homo Sapiens
tcccagcggggcctcca

SEQ ID NO: 66850 - DNA, 16 bp, Homo Sapiens
tcccagcggtgcctcc

SEQ ID NO: 66851 - DNA, 17 bp, Homo Sapiens
tcccagcggtgcctcca

SEQ ID NO: 66852 - DNA, 18 bp, Homo Sapiens
tcccatatggtctagcgg

SEQ ID NO: 66853 - DNA, 19 bp, Homo Sapiens
tcccatatggtctagcggt

SEQ ID NO: 66854 - DNA, 23 bp, Homo Sapiens
tcccatatggtctagcggttagg

SEQ ID NO: 66855 - DNA, 24 bp, Homo Sapiens
tcccatatggtctagcggttagga

SEQ ID NO: 66856 - DNA, 16 bp, Homo Sapiens
tcccatcctcgtcgcc

SEQ ID NO: 66857 - DNA, 17 bp, Homo Sapiens
tcccatcctcgtcgcca

SEQ ID NO: 66858 - DNA, 16 bp, Homo Sapiens
tcccatctgggtcgcc

SEQ ID NO: 66859 - DNA, 18 bp, Homo Sapiens
tccccagcatctccacca

SEQ ID NO: 66860 - DNA, 18 bp, Homo Sapiens
tccccagtacctccacca

SEQ ID NO: 66861 - DNA, 21 bp, Homo Sapiens
tccccgcgcaggttcgaatcc

SEQ ID NO: 66862 - DNA, 22 bp, Homo Sapiens
tccccgcgcaggttcgaatcct

SEQ ID NO: 66863 - DNA, 17 bp, Homo Sapiens
tccccggcacctccacc

SEQ ID NO: 66864 - DNA, 18 bp, Homo Sapiens
tccccggcacctccacca

SEQ ID NO: 66865 - DNA, 17 bp, Homo Sapiens
tccccggcatctccacc

SEQ ID NO: 66866 - DNA, 18 bp, Homo Sapiens
tccccggcatctccacca

SEQ ID NO: 66867 - DNA, 17 bp, Homo Sapiens
tccccgtacgggccacc

SEQ ID NO: 66868 - DNA, 18 bp, Homo Sapiens
tccccgtacgggccacca

SEQ ID NO: 66869 - DNA, 16 bp, Homo Sapiens
tcccggacgagccccc

SEQ ID NO: 66870 - DNA, 17 bp, Homo Sapiens
tcccggacgagccccca

SEQ ID NO: 66871 - DNA, 16 bp, Homo Sapiens
tcccggccaacgcacc

SEQ ID NO: 66872 - DNA, 17 bp, Homo Sapiens
tcccggccaacgcacca

SEQ ID NO: 66873 - DNA, 16 bp, Homo Sapiens
tcccggccaatgcacc

SEQ ID NO: 66874 - DNA, 17 bp, Homo Sapiens
tcccggccaatgcacca

SEQ ID NO: 66875 - DNA, 17 bp, Homo Sapiens
tcccggcggagtcgcca

SEQ ID NO: 66876 - DNA, 18 bp, Homo Sapiens
tcccgggcggaaacacca

SEQ ID NO: 66877 - DNA, 16 bp, Homo Sapiens
tcccgggcggcgcacc

SEQ ID NO: 66878 - DNA, 17 bp, Homo Sapiens
tcccgggcggcgcacca

SEQ ID NO: 66879 - DNA, 20 bp, Homo Sapiens
tcccgggttcaaatcccgga

SEQ ID NO: 66880 - DNA, 17 bp, Homo Sapiens
tcccgggtttcggcacc

SEQ ID NO: 66881 - DNA, 18 bp, Homo Sapiens
tcccgggtttcggcacca

SEQ ID NO: 66882 - DNA, 17 bp, Homo Sapiens
tcccggtcagggaacca

SEQ ID NO: 66883 - DNA, 17 bp, Homo Sapiens
tcccggtgtgggaacca

SEQ ID NO: 66884 - DNA, 19 bp, Homo Sapiens
tccctggtagtctagtggc

SEQ ID NO: 66885 - DNA, 16 bp, Homo Sapiens
tccctggtggtctagt

SEQ ID NO: 66886 - DNA, 17 bp, Homo Sapiens
tccctggtggtctagtg

SEQ ID NO: 66887 - DNA, 18 bp, Homo Sapiens
tccctggtggtctagtgg

SEQ ID NO: 66888 - DNA, 19 bp, Homo Sapiens
tccctggtggtctagtggc

SEQ ID NO: 66889 - DNA, 24 bp, Homo Sapiens
tccctggtggtctagtggctagga

SEQ ID NO: 66890 - DNA, 19 bp, Homo Sapiens
tccctggtggtctagtggt

SEQ ID NO: 66891 - DNA, 20 bp, Homo Sapiens
tccctggtggtctagtggtt

SEQ ID NO: 66892 - DNA, 22 bp, Homo Sapiens
tccctggtggtctagtggttag

SEQ ID NO: 66893 - DNA, 23 bp, Homo Sapiens
tccctggtggtctagtggttagg

SEQ ID NO: 66894 - DNA, 24 bp, Homo Sapiens
tccctggtggtctagtggttagga

SEQ ID NO: 66895 - DNA, 25 bp, Homo Sapiens
tccctggtggtctagtggttaggat

SEQ ID NO: 66896 - DNA, 17 bp, Homo Sapiens
tccctgtggtctagtgg

SEQ ID NO: 66897 - DNA, 18 bp, Homo Sapiens
tccctgtggtctagtggt

SEQ ID NO: 66898 - DNA, 16 bp, Homo Sapiens
tccctgttcgggcgcc

SEQ ID NO: 66899 - DNA, 17 bp, Homo Sapiens
tccctgttcgggcgcca

SEQ ID NO: 66900 - DNA, 16 bp, Homo Sapiens
tcccttcgtggtcgcc

SEQ ID NO: 66901 - DNA, 17 bp, Homo Sapiens
tcccttcgtggtcgcca

SEQ ID NO: 66902 - DNA, 18 bp, Homo Sapiens
tccgaggtgattttcata

SEQ ID NO: 66903 - DNA, 20 bp, Homo Sapiens
tccgaggtgattttcatatt

SEQ ID NO: 66904 - DNA, 21 bp, Homo Sapiens
tccgaggtgattttcatattg

SEQ ID NO: 66905 - DNA, 16 bp, Homo Sapiens
tccgagtcacggcacc

SEQ ID NO: 66906 - DNA, 17 bp, Homo Sapiens
tccgagtcacggcacca

SEQ ID NO: 66907 - DNA, 17 bp, Homo Sapiens
tccggatggaggcgtgg

SEQ ID NO: 66908 - DNA, 18 bp, Homo Sapiens
tccggatggaggcgtggg

SEQ ID NO: 66909 - DNA, 19 bp, Homo Sapiens
tccggatggaggcgtgggt

SEQ ID NO: 66910 - DNA, 16 bp, Homo Sapiens
tccggctcgaaggacc

SEQ ID NO: 66911 - DNA, 17 bp, Homo Sapiens
tccggctcgaaggacca

SEQ ID NO: 66912 - DNA, 16 bp, Homo Sapiens
tccggctcggaggacc

SEQ ID NO: 66913 - DNA, 17 bp, Homo Sapiens
tccggctcggaggacca

SEQ ID NO: 66914 - DNA, 16 bp, Homo Sapiens
tccgggtgccccctcc

SEQ ID NO: 66915 - DNA, 17 bp, Homo Sapiens
tccgggtgccccctcca

SEQ ID NO: 66916 - DNA, 20 bp, Homo Sapiens
tccgggttcgagtcccggcg

SEQ ID NO: 66917 - DNA, 16 bp, Homo Sapiens
tccgtagtgtagtggt

SEQ ID NO: 66918 - DNA, 19 bp, Homo Sapiens
tccgtagtgtagtggttat

SEQ ID NO: 66919 - DNA, 20 bp, Homo Sapiens
tccgtagtgtagtggttatc

SEQ ID NO: 66920 - DNA, 21 bp, Homo Sapiens
tccgtagtgtagtggttatca

SEQ ID NO: 66921 - DNA, 16 bp, Homo Sapiens
tccgtgcgagaatacc

SEQ ID NO: 66922 - DNA, 17 bp, Homo Sapiens
tccgtgcgagaatacca

SEQ ID NO: 66923 - DNA, 16 bp, Homo Sapiens
tccgtggcgcaatgga

SEQ ID NO: 66924 - DNA, 17 bp, Homo Sapiens
tcctatatatcttacca

SEQ ID NO: 66925 - DNA, 18 bp, Homo Sapiens
tcctcacctggagcacca

SEQ ID NO: 66926 - DNA, 16 bp, Homo Sapiens
tcctcgttagtatagt

SEQ ID NO: 66927 - DNA, 17 bp, Homo Sapiens
tcctcgttagtatagtg

SEQ ID NO: 66928 - DNA, 18 bp, Homo Sapiens
tcctcgttagtatagtgg

SEQ ID NO: 66929 - DNA, 19 bp, Homo Sapiens
tcctcgttagtatagtggt

SEQ ID NO: 66930 - DNA, 20 bp, Homo Sapiens
tcctcgttagtatagtggtg

SEQ ID NO: 66931 - DNA, 21 bp, Homo Sapiens
tcctcgttagtatagtggtga

SEQ ID NO: 66932 - DNA, 22 bp, Homo Sapiens
tcctcgttagtatagtggtgag

SEQ ID NO: 66933 - DNA, 23 bp, Homo Sapiens
tcctcgttagtatagtggtgagt

SEQ ID NO: 66934 - DNA, 20 bp, Homo Sapiens
tcctcgttagtatagtggtt

SEQ ID NO: 66935 - DNA, 23 bp, Homo Sapiens
tcctcgttagtatagtggttagt

SEQ ID NO: 66936 - DNA, 16 bp, Homo Sapiens
tcctcttcttaacacc

SEQ ID NO: 66937 - DNA, 16 bp, Homo Sapiens
tcctgccgactacgcc

SEQ ID NO: 66938 - DNA, 17 bp, Homo Sapiens
tcctgccgactacgcca

SEQ ID NO: 66939 - DNA, 16 bp, Homo Sapiens
tcctgccgcggtcgcc

SEQ ID NO: 66940 - DNA, 17 bp, Homo Sapiens
tcctgccgcggtcgcca

SEQ ID NO: 66941 - DNA, 17 bp, Homo Sapiens
tcctgctcacagcgcca

SEQ ID NO: 66942 - DNA, 16 bp, Homo Sapiens
tcctggctggctcgcc

SEQ ID NO: 66943 - DNA, 17 bp, Homo Sapiens
tcctggctggctcgcca

SEQ ID NO: 66944 - DNA, 17 bp, Homo Sapiens
tcctgttcgtgacgcca

SEQ ID NO: 66945 - DNA, 17 bp, Homo Sapiens
tccttccttttttgcca

SEQ ID NO: 66946 - DNA, 18 bp, Homo Sapiens
tcgaaaccatcctctgct

SEQ ID NO: 66947 - DNA, 20 bp, Homo Sapiens
tcgaaaccatcctctgctac

SEQ ID NO: 66948 - DNA, 21 bp, Homo Sapiens
tcgaaaccatcctctgctacc

SEQ ID NO: 66949 - DNA, 22 bp, Homo Sapiens
tcgaaaccatcctctgctacca

SEQ ID NO: 66950 - DNA, 21 bp, Homo Sapiens
tcgaaaccgggcggaaacacc

SEQ ID NO: 66951 - DNA, 22 bp, Homo Sapiens
tcgaaaccgggcggaaacacca

SEQ ID NO: 66952 - DNA, 25 bp, Homo Sapiens
tcgaagaagcagcttcaaacctgcc

SEQ ID NO: 66953 - DNA, 21 bp, Homo Sapiens
tcgaatcacgtcggggtcacc

SEQ ID NO: 66954 - DNA, 22 bp, Homo Sapiens
tcgaatcacgtcggggtcacca

SEQ ID NO: 66955 - DNA, 21 bp, Homo Sapiens
tcgaatcccaccgctgccacc

SEQ ID NO: 66956 - DNA, 19 bp, Homo Sapiens
tcgaatcccactcctgaca

SEQ ID NO: 66957 - DNA, 20 bp, Homo Sapiens
tcgaatcccactcctgacac

SEQ ID NO: 66958 - DNA, 21 bp, Homo Sapiens
tcgaatcccactcctgacacc

SEQ ID NO: 66959 - DNA, 22 bp, Homo Sapiens
tcgaatcccactcctgacacca

SEQ ID NO: 66960 - DNA, 19 bp, Homo Sapiens
tcgaatcccacttctgaca

SEQ ID NO: 66961 - DNA, 21 bp, Homo Sapiens
tcgaatcccacttctgacacc

SEQ ID NO: 66962 - DNA, 20 bp, Homo Sapiens
tcgaatcccatcctcgtcgc

SEQ ID NO: 66963 - DNA, 21 bp, Homo Sapiens
tcgaatcccatcctcgtcgcc

SEQ ID NO: 66964 - DNA, 22 bp, Homo Sapiens
tcgaatcccatcctcgtcgcca

SEQ ID NO: 66965 - DNA, 18 bp, Homo Sapiens
tcgaatccgagtcacggc

SEQ ID NO: 66966 - DNA, 19 bp, Homo Sapiens
tcgaatccgagtcacggca

SEQ ID NO: 66967 - DNA, 20 bp, Homo Sapiens
tcgaatccgagtcacggcac

SEQ ID NO: 66968 - DNA, 21 bp, Homo Sapiens
tcgaatccgagtcacggcacc

SEQ ID NO: 66969 - DNA, 22 bp, Homo Sapiens
tcgaatccgagtcacggcacca

SEQ ID NO: 66970 - DNA, 22 bp, Homo Sapiens
tcgaatccggctcgaaggacca

SEQ ID NO: 66971 - DNA, 22 bp, Homo Sapiens
tcgaatcctgccgactacgcca

SEQ ID NO: 66972 - DNA, 19 bp, Homo Sapiens
tcgactcccggtgtgggaa

SEQ ID NO: 66973 - DNA, 20 bp, Homo Sapiens
tcgactcccggtgtgggaac

SEQ ID NO: 66974 - DNA, 21 bp, Homo Sapiens
tcgactcccggtgtgggaacc

SEQ ID NO: 66975 - DNA, 22 bp, Homo Sapiens
tcgactcccggtgtgggaacca

SEQ ID NO: 66976 - DNA, 21 bp, Homo Sapiens
tcgactcctggctggctcgcc

SEQ ID NO: 66977 - DNA, 20 bp, Homo Sapiens
tcgagcctcacctggagcac

SEQ ID NO: 66978 - DNA, 21 bp, Homo Sapiens
tcgagcctcacctggagcacc

SEQ ID NO: 66979 - DNA, 22 bp, Homo Sapiens
tcgagcctcacctggagcacca

SEQ ID NO: 66980 - DNA, 20 bp, Homo Sapiens
tcgattccccgacggggagc

SEQ ID NO: 66981 - DNA, 21 bp, Homo Sapiens
tcgattccccgacggggagcc

SEQ ID NO: 66982 - DNA, 22 bp, Homo Sapiens
tcgattccccgacggggagcca

SEQ ID NO: 66983 - DNA, 19 bp, Homo Sapiens
tcgattcccggccaacgca

SEQ ID NO: 66984 - DNA, 21 bp, Homo Sapiens
tcgattcccggccaacgcacc

SEQ ID NO: 66985 - DNA, 22 bp, Homo Sapiens
tcgattcccggccaacgcacca

SEQ ID NO: 66986 - DNA, 19 bp, Homo Sapiens
tcgattcccggccaatgca

SEQ ID NO: 66987 - DNA, 21 bp, Homo Sapiens
tcgattcccggccaatgcacc

SEQ ID NO: 66988 - DNA, 16 bp, Homo Sapiens
tcgattcccgggcggc

SEQ ID NO: 66989 - DNA, 22 bp, Homo Sapiens
tcgattcccgggcggcgcacca

SEQ ID NO: 66990 - DNA, 20 bp, Homo Sapiens
tcgattccggctcgaaggac

SEQ ID NO: 66991 - DNA, 21 bp, Homo Sapiens
tcgattccggctcgaaggacc

SEQ ID NO: 66992 - DNA, 22 bp, Homo Sapiens
tcgattccggctcgaaggacca

SEQ ID NO: 66993 - DNA, 20 bp, Homo Sapiens
tcgattctcatagtcctagc

SEQ ID NO: 66994 - DNA, 21 bp, Homo Sapiens
tcgattctcatagtcctagcc

SEQ ID NO: 66995 - DNA, 18 bp, Homo Sapiens
tcgcataaaacttaaaac

SEQ ID NO: 66996 - DNA, 20 bp, Homo Sapiens
tcgcgggttcgatccccgta

SEQ ID NO: 66997 - DNA, 19 bp, Homo Sapiens
tcgggcccataccccgaaa

SEQ ID NO: 66998 - DNA, 17 bp, Homo Sapiens
tcgggtgcgagaggtcc

SEQ ID NO: 66999 - DNA, 18 bp, Homo Sapiens
tcgggtgcgagaggtccc

SEQ ID NO: 67000 - DNA, 19 bp, Homo Sapiens
tcgggtgcgagaggtcccg

SEQ ID NO: 67001 - DNA, 20 bp, Homo Sapiens
tcgggtgcgagaggtcccgg

SEQ ID NO: 67002 - DNA, 16 bp, Homo Sapiens
tcggtagagcatgaga

SEQ ID NO: 67003 - DNA, 17 bp, Homo Sapiens
tcggtagagcatgagac

SEQ ID NO: 67004 - DNA, 19 bp, Homo Sapiens
tcggtagagcatgagactc

SEQ ID NO: 67005 - DNA, 20 bp, Homo Sapiens
tcggtagagcatgagactct

SEQ ID NO: 67006 - DNA, 21 bp, Homo Sapiens
tcggtagagcatgagactctt

SEQ ID NO: 67007 - DNA, 16 bp, Homo Sapiens
tcggtagagcatggga

SEQ ID NO: 67008 - DNA, 17 bp, Homo Sapiens
tcggtagagcatgggac

SEQ ID NO: 67009 - DNA, 18 bp, Homo Sapiens
tcggtagagcatgggact

SEQ ID NO: 67010 - DNA, 19 bp, Homo Sapiens
tcggtagagcatgggactc

SEQ ID NO: 67011 - DNA, 20 bp, Homo Sapiens
tcggtagagcatgggactct

SEQ ID NO: 67012 - DNA, 21 bp, Homo Sapiens
tcggtagagcatgggactctt

SEQ ID NO: 67013 - DNA, 18 bp, Homo Sapiens
tcgtatagtggttagtac

SEQ ID NO: 67014 - DNA, 21 bp, Homo Sapiens
tcgtatagtggttagtactct

SEQ ID NO: 67015 - DNA, 19 bp, Homo Sapiens
tcgtggttgtagtccgtgc

SEQ ID NO: 67016 - DNA, 20 bp, Homo Sapiens
tcgtggttgtagtccgtgcg

SEQ ID NO: 67017 - DNA, 18 bp, Homo Sapiens
tctaacaacatggctttc

SEQ ID NO: 67018 - DNA, 19 bp, Homo Sapiens
tctaacaacatggctttct

SEQ ID NO: 67019 - DNA, 21 bp, Homo Sapiens
tctaacaacatggctttctca

SEQ ID NO: 67020 - DNA, 23 bp, Homo Sapiens
tctaacaacatggctttctcacc

SEQ ID NO: 67021 - DNA, 24 bp, Homo Sapiens
tctaacaacatggctttctcacca

SEQ ID NO: 67022 - DNA, 16 bp, Homo Sapiens
tctaaggcgctggatt

SEQ ID NO: 67023 - DNA, 20 bp, Homo Sapiens
tctaggggtatgattctcgc

SEQ ID NO: 67024 - DNA, 20 bp, Homo Sapiens
tctagtggttaggattcggc

SEQ ID NO: 67025 - DNA, 22 bp, Homo Sapiens
tctagtggttaggattcggcgc

SEQ ID NO: 67026 - DNA, 18 bp, Homo Sapiens
tctcagggtcgtgggttc

SEQ ID NO: 67027 - DNA, 16 bp, Homo Sapiens
tctcatagtcctagcc

SEQ ID NO: 67028 - DNA, 17 bp, Homo Sapiens
tctcatagtcctagcca

SEQ ID NO: 67029 - DNA, 16 bp, Homo Sapiens
tctccggatggaggcg

SEQ ID NO: 67030 - DNA, 17 bp, Homo Sapiens
tctccggatggaggcgt

SEQ ID NO: 67031 - DNA, 19 bp, Homo Sapiens
tctccggatggaggcgtgg

SEQ ID NO: 67032 - DNA, 20 bp, Homo Sapiens
tctccggatggaggcgtggg

SEQ ID NO: 67033 - DNA, 21 bp, Homo Sapiens
tctccggatggaggcgtgggt

SEQ ID NO: 67034 - DNA, 22 bp, Homo Sapiens
tctccggatggaggcgtgggtt

SEQ ID NO: 67035 - DNA, 16 bp, Homo Sapiens
tctcgctggggcctcc

SEQ ID NO: 67036 - DNA, 17 bp, Homo Sapiens
tctcgctggggcctcca

SEQ ID NO: 67037 - DNA, 16 bp, Homo Sapiens
tctcggtggaacctcc

SEQ ID NO: 67038 - DNA, 17 bp, Homo Sapiens
tctcggtggaacctcca

SEQ ID NO: 67039 - DNA, 16 bp, Homo Sapiens
tctcggtgggacctcc

SEQ ID NO: 67040 - DNA, 17 bp, Homo Sapiens
tctcggtgggacctcca

SEQ ID NO: 67041 - DNA, 19 bp, Homo Sapiens
tctctgtggcgcaatggac

SEQ ID NO: 67042 - DNA, 16 bp, Homo Sapiens
tctcttcgggggcgtg

SEQ ID NO: 67043 - DNA, 17 bp, Homo Sapiens
tctcttcgggggcgtgg

SEQ ID NO: 67044 - DNA, 18 bp, Homo Sapiens
tctgaaggtcctgagttc

SEQ ID NO: 67045 - DNA, 18 bp, Homo Sapiens
tctgaaggtcgtgagttc

SEQ ID NO: 67046 - DNA, 19 bp, Homo Sapiens
tctgaaggtcgtgagttcg

SEQ ID NO: 67047 - DNA, 17 bp, Homo Sapiens
tctgacaacagaggctt

SEQ ID NO: 67048 - DNA, 19 bp, Homo Sapiens
tctgacaacagaggcttac

SEQ ID NO: 67049 - DNA, 19 bp, Homo Sapiens
tctgacttcggatcagaag

SEQ ID NO: 67050 - DNA, 20 bp, Homo Sapiens
tctgacttcggatcagaaga

SEQ ID NO: 67051 - DNA, 18 bp, Homo Sapiens
tctgagggtccagggttc

SEQ ID NO: 67052 - DNA, 19 bp, Homo Sapiens
tctgattccggatcagaag

SEQ ID NO: 67053 - DNA, 20 bp, Homo Sapiens
tctgattccggatcagaaga

SEQ ID NO: 67054 - DNA, 16 bp, Homo Sapiens
tctgcgttgtggccgc

SEQ ID NO: 67055 - DNA, 16 bp, Homo Sapiens
tctggactctgaatcc

SEQ ID NO: 67056 - DNA, 19 bp, Homo Sapiens
tctggactctgaatccagc

SEQ ID NO: 67057 - DNA, 16 bp, Homo Sapiens
tctgtggcgcaatgga

SEQ ID NO: 67058 - DNA, 17 bp, Homo Sapiens
tctgtggcgcaatggac

SEQ ID NO: 67059 - DNA, 17 bp, Homo Sapiens
tcttaatcccagggtcg

SEQ ID NO: 67060 - DNA, 18 bp, Homo Sapiens
tcttaatcccagggtcgt

SEQ ID NO: 67061 - DNA, 19 bp, Homo Sapiens
tcttaatcccagggtcgtg

SEQ ID NO: 67062 - DNA, 20 bp, Homo Sapiens
tcttaatcccagggtcgtgg

SEQ ID NO: 67063 - DNA, 19 bp, Homo Sapiens
tcttaatctcagggtcgtg

SEQ ID NO: 67064 - DNA, 16 bp, Homo Sapiens
tcttcgggggcgtggg

SEQ ID NO: 67065 - DNA, 17 bp, Homo Sapiens
tcttcgggggcgtgggt

SEQ ID NO: 67066 - DNA, 18 bp, Homo Sapiens
tcttcgggggcgtgggtt

SEQ ID NO: 67067 - DNA, 19 bp, Homo Sapiens
tcttcgggggcgtgggttt

SEQ ID NO: 67068 - DNA, 25 bp, Homo Sapiens
tgaaaacctttttccaaggacacca

SEQ ID NO: 67069 - DNA, 19 bp, Homo Sapiens
tgaaaatgtttagacgggc

SEQ ID NO: 67070 - DNA, 20 bp, Homo Sapiens
tgaaaatgtttagacgggct

SEQ ID NO: 67071 - DNA, 21 bp, Homo Sapiens
tgaaaatgtttagacgggctc

SEQ ID NO: 67072 - DNA, 22 bp, Homo Sapiens
tgaaaatgtttagacgggctca

SEQ ID NO: 67073 - DNA, 23 bp, Homo Sapiens
tgaaaatgtttagacgggctcac

SEQ ID NO: 67074 - DNA, 16 bp, Homo Sapiens
tgaagcattggactgt

SEQ ID NO: 67075 - DNA, 17 bp, Homo Sapiens
tgaagcattggactgta

SEQ ID NO: 67076 - DNA, 18 bp, Homo Sapiens
tgaatccagcgatccgag

SEQ ID NO: 67077 - DNA, 21 bp, Homo Sapiens
tgaatccagcgatccgagttc

SEQ ID NO: 67078 - DNA, 22 bp, Homo Sapiens
tgaatccagcgatccgagttca

SEQ ID NO: 67079 - DNA, 17 bp, Homo Sapiens
tgaatctgacaacagag

SEQ ID NO: 67080 - DNA, 18 bp, Homo Sapiens
tgaatctgacaacagagg

SEQ ID NO: 67081 - DNA, 19 bp, Homo Sapiens
tgaatctgacaacagaggc

SEQ ID NO: 67082 - DNA, 20 bp, Homo Sapiens
tgaatctgacaacagaggct

SEQ ID NO: 67083 - DNA, 21 bp, Homo Sapiens
tgaatctgacaacagaggctt

SEQ ID NO: 67084 - DNA, 24 bp, Homo Sapiens
tgaatctgacaacagaggcttacg

SEQ ID NO: 67085 - DNA, 25 bp, Homo Sapiens
tgaatctgacaacagaggcttacga

SEQ ID NO: 67086 - DNA, 17 bp, Homo Sapiens
tgacaacagaggcttac

SEQ ID NO: 67087 - DNA, 25 bp, Homo Sapiens
tgacaacattcaaaaaagagtacca

SEQ ID NO: 67088 - DNA, 18 bp, Homo Sapiens
tgacttcggatcagaaga

SEQ ID NO: 67089 - DNA, 17 bp, Homo Sapiens
tgagtgaagcattggac

SEQ ID NO: 67090 - DNA, 18 bp, Homo Sapiens
tgagtgaagcattggact

SEQ ID NO: 67091 - DNA, 20 bp, Homo Sapiens
tgagtgaagcattggactgt

SEQ ID NO: 67092 - DNA, 21 bp, Homo Sapiens
tgagtgaagcattggactgta

SEQ ID NO: 67093 - DNA, 20 bp, Homo Sapiens
tgataatcatatttaccaac

SEQ ID NO: 67094 - DNA, 21 bp, Homo Sapiens
tgataatcatatttaccaacc

SEQ ID NO: 67095 - DNA, 22 bp, Homo Sapiens
tgataatcatatttaccaacca

SEQ ID NO: 67096 - DNA, 20 bp, Homo Sapiens
tgatagagtaaataatagga

SEQ ID NO: 67097 - DNA, 18 bp, Homo Sapiens
tgattccggatcagaaga

SEQ ID NO: 67098 - DNA, 22 bp, Homo Sapiens
tgattctcgcttcgggtgcgag

SEQ ID NO: 67099 - DNA, 22 bp, Homo Sapiens
tgattctcgctttgggtgcgag

SEQ ID NO: 67100 - DNA, 23 bp, Homo Sapiens
tgattctcggtttgggtccgaga

SEQ ID NO: 67101 - DNA, 17 bp, Homo Sapiens
tgatttcgactcattaa

SEQ ID NO: 67102 - DNA, 18 bp, Homo Sapiens
tgatttcgactcattaaa

SEQ ID NO: 67103 - DNA, 19 bp, Homo Sapiens
tgatttcgactcattaaat

SEQ ID NO: 67104 - DNA, 20 bp, Homo Sapiens
tgatttcgactcattaaatt

SEQ ID NO: 67105 - DNA, 18 bp, Homo Sapiens
tgatttgcgttcagttga

SEQ ID NO: 67106 - DNA, 18 bp, Homo Sapiens
tgcaaattcgaagaagca

SEQ ID NO: 67107 - DNA, 19 bp, Homo Sapiens
tgcaaattcgaagaagcag

SEQ ID NO: 67108 - DNA, 20 bp, Homo Sapiens
tgcaaattcgaagaagcagc

SEQ ID NO: 67109 - DNA, 19 bp, Homo Sapiens
tgcaactccaaataaaagt

SEQ ID NO: 67110 - DNA, 20 bp, Homo Sapiens
tgcaactccaaataaaagta

SEQ ID NO: 67111 - DNA, 21 bp, Homo Sapiens
tgcaactccaaataaaagtac

SEQ ID NO: 67112 - DNA, 22 bp, Homo Sapiens
tgcaactccaaataaaagtacc

SEQ ID NO: 67113 - DNA, 23 bp, Homo Sapiens
tgcaactccaaataaaagtacca

SEQ ID NO: 67114 - DNA, 19 bp, Homo Sapiens
tgcaatacttaatttctgc

SEQ ID NO: 67115 - DNA, 20 bp, Homo Sapiens
tgcaatacttaatttctgcc

SEQ ID NO: 67116 - DNA, 21 bp, Homo Sapiens
tgcaatacttaatttctgcca

SEQ ID NO: 67117 - DNA, 16 bp, Homo Sapiens
tgcccccatgtctaac

SEQ ID NO: 67118 - DNA, 17 bp, Homo Sapiens
tgcccccatgtctaaca

SEQ ID NO: 67119 - DNA, 19 bp, Homo Sapiens
tgcccccatgtctaacaac

SEQ ID NO: 67120 - DNA, 20 bp, Homo Sapiens
tgcccccatgtctaacaaca

SEQ ID NO: 67121 - DNA, 23 bp, Homo Sapiens
tgcccccatgtctaacaacatgg

SEQ ID NO: 67122 - DNA, 24 bp, Homo Sapiens
tgcccccatgtctaacaacatggc

SEQ ID NO: 67123 - DNA, 25 bp, Homo Sapiens
tgcccccatgtctaacaacatggct

SEQ ID NO: 67124 - DNA, 18 bp, Homo Sapiens
tgcccgcatcctccacca

SEQ ID NO: 67125 - DNA, 17 bp, Homo Sapiens
tgccgtgatcgtatagt

SEQ ID NO: 67126 - DNA, 18 bp, Homo Sapiens
tgccgtgatcgtatagtg

SEQ ID NO: 67127 - DNA, 19 bp, Homo Sapiens
tgccgtgatcgtatagtgg

SEQ ID NO: 67128 - DNA, 20 bp, Homo Sapiens
tgccgtgatcgtatagtggt

SEQ ID NO: 67129 - DNA, 21 bp, Homo Sapiens
tgccgtgatcgtatagtggtt

SEQ ID NO: 67130 - DNA, 22 bp, Homo Sapiens
tgccgtgatcgtatagtggtta

SEQ ID NO: 67131 - DNA, 23 bp, Homo Sapiens
tgccgtgatcgtatagtggttag

SEQ ID NO: 67132 - DNA, 24 bp, Homo Sapiens
tgccgtgatcgtatagtggttagt

SEQ ID NO: 67133 - DNA, 16 bp, Homo Sapiens
tgctaatccattgtgc

SEQ ID NO: 67134 - DNA, 17 bp, Homo Sapiens
tgctaatccattgtgct

SEQ ID NO: 67135 - DNA, 21 bp, Homo Sapiens
tgctaatccattgtgctttgc

SEQ ID NO: 67136 - DNA, 22 bp, Homo Sapiens
tgctaatccattgtgctttgca

SEQ ID NO: 67137 - DNA, 21 bp, Homo Sapiens
tggacatatgtccgcgtgggt

SEQ ID NO: 67138 - DNA, 17 bp, Homo Sapiens
tggactctgaatccagc

SEQ ID NO: 67139 - DNA, 17 bp, Homo Sapiens
tggactttgaatccagc

SEQ ID NO: 67140 - DNA, 16 bp, Homo Sapiens
tggaggcgtgggttcg

SEQ ID NO: 67141 - DNA, 22 bp, Homo Sapiens
tggaggcgtgggttcgaatccc

SEQ ID NO: 67142 - DNA, 16 bp, Homo Sapiens
tggagttaaagacttt

SEQ ID NO: 67143 - DNA, 17 bp, Homo Sapiens
tggagttaaagactttt

SEQ ID NO: 67144 - DNA, 19 bp, Homo Sapiens
tggagttaaagactttttc

SEQ ID NO: 67145 - DNA, 20 bp, Homo Sapiens
tggagttaaagactttttct

SEQ ID NO: 67146 - DNA, 21 bp, Homo Sapiens
tggagttaaagactttttctc

SEQ ID NO: 67147 - DNA, 24 bp, Homo Sapiens
tggagttaaagactttttctctga

SEQ ID NO: 67148 - DNA, 25 bp, Homo Sapiens
tggagttaaagactttttctctgac

SEQ ID NO: 67149 - DNA, 17 bp, Homo Sapiens
tggccgagcggtctaag

SEQ ID NO: 67150 - DNA, 16 bp, Homo Sapiens
tggccgagtggttaag

SEQ ID NO: 67151 - DNA, 21 bp, Homo Sapiens
tggccgcagcaacctcggttc

SEQ ID NO: 67152 - DNA, 22 bp, Homo Sapiens
tggccgcagcaacctcggttcg

SEQ ID NO: 67153 - DNA, 23 bp, Homo Sapiens
tggccgcagcaacctcggttcga

SEQ ID NO: 67154 - DNA, 18 bp, Homo Sapiens
tggctgagtgaagcattg

SEQ ID NO: 67155 - DNA, 21 bp, Homo Sapiens
tggctgagtgaagcattggac

SEQ ID NO: 67156 - DNA, 16 bp, Homo Sapiens
tggggattgtgggttc

SEQ ID NO: 67157 - DNA, 17 bp, Homo Sapiens
tggggattgtgggttcg

SEQ ID NO: 67158 - DNA, 23 bp, Homo Sapiens
tggggattgtgggttcgagtccc

SEQ ID NO: 67159 - DNA, 20 bp, Homo Sapiens
tggggggttcgattccttcc

SEQ ID NO: 67160 - DNA, 16 bp, Homo Sapiens
tggggttttgcagtcc

SEQ ID NO: 67161 - DNA, 21 bp, Homo Sapiens
tggggttttgcagtccttacc

SEQ ID NO: 67162 - DNA, 22 bp, Homo Sapiens
tggggttttgcagtccttacca

SEQ ID NO: 67163 - DNA, 20 bp, Homo Sapiens
tgggtggttcagtggtagaa

SEQ ID NO: 67164 - DNA, 23 bp, Homo Sapiens
tgggtggttcagtggtagaattc

SEQ ID NO: 67165 - DNA, 24 bp, Homo Sapiens
tgggtggttcagtggtagaattct

SEQ ID NO: 67166 - DNA, 17 bp, Homo Sapiens
tgggttcgaatcccagc

SEQ ID NO: 67167 - DNA, 17 bp, Homo Sapiens
tgggttcgagccccacg

SEQ ID NO: 67168 - DNA, 22 bp, Homo Sapiens
tgggttcgagccccacgttggg

SEQ ID NO: 67169 - DNA, 23 bp, Homo Sapiens
tgggttcgagccccacgttgggc

SEQ ID NO: 67170 - DNA, 25 bp, Homo Sapiens
tgggttcgagccccacgttgggcgc

SEQ ID NO: 67171 - DNA, 22 bp, Homo Sapiens
tgggttcgagccccagtggaac

SEQ ID NO: 67172 - DNA, 25 bp, Homo Sapiens
tgggtttaagtcccattggtctagc

SEQ ID NO: 67173 - DNA, 16 bp, Homo Sapiens
tggtagaattctcgcc

SEQ ID NO: 67174 - DNA, 17 bp, Homo Sapiens
tggtagaattctcgcct

SEQ ID NO: 67175 - DNA, 19 bp, Homo Sapiens
tggtagaattctcgcctgc

SEQ ID NO: 67176 - DNA, 20 bp, Homo Sapiens
tggtagaattctcgcctgcc

SEQ ID NO: 67177 - DNA, 21 bp, Homo Sapiens
tggtagaattctcgcctgcca

SEQ ID NO: 67178 - DNA, 22 bp, Homo Sapiens
tggtagaattctcgcctgccac

SEQ ID NO: 67179 - DNA, 16 bp, Homo Sapiens
tggtatatagtttaaa

SEQ ID NO: 67180 - DNA, 17 bp, Homo Sapiens
tggtatatagtttaaac

SEQ ID NO: 67181 - DNA, 16 bp, Homo Sapiens
tggtcgtggttgtagt

SEQ ID NO: 67182 - DNA, 17 bp, Homo Sapiens
tggtcgtggttgtagtc

SEQ ID NO: 67183 - DNA, 18 bp, Homo Sapiens
tggtcgtggttgtagtcc

SEQ ID NO: 67184 - DNA, 19 bp, Homo Sapiens
tggtcgtggttgtagtccg

SEQ ID NO: 67185 - DNA, 20 bp, Homo Sapiens
tggtcgtggttgtagtccgt

SEQ ID NO: 67186 - DNA, 22 bp, Homo Sapiens
tggtcgtggttgtagtccgtgc

SEQ ID NO: 67187 - DNA, 23 bp, Homo Sapiens
tggtcgtggttgtagtccgtgcg

SEQ ID NO: 67188 - DNA, 17 bp, Homo Sapiens
tggtctaaggcgccaga

SEQ ID NO: 67189 - DNA, 17 bp, Homo Sapiens
tggtctaaggcgctgga

SEQ ID NO: 67190 - DNA, 18 bp, Homo Sapiens
tggtctagtggttaggat

SEQ ID NO: 67191 - DNA, 20 bp, Homo Sapiens
tggtctagtggttaggattc

SEQ ID NO: 67192 - DNA, 23 bp, Homo Sapiens
tggtctagtggttaggattcggc

SEQ ID NO: 67193 - DNA, 18 bp, Homo Sapiens
tggtctccggatggaggc

SEQ ID NO: 67194 - DNA, 16 bp, Homo Sapiens
tggtgagtatccccgc

SEQ ID NO: 67195 - DNA, 17 bp, Homo Sapiens
tggtgcaactccaaata

SEQ ID NO: 67196 - DNA, 23 bp, Homo Sapiens
tggtgcaactccaaataaaagta

SEQ ID NO: 67197 - DNA, 25 bp, Homo Sapiens
tggtgcaactccaaataaaagtacc

SEQ ID NO: 67198 - DNA, 16 bp, Homo Sapiens
tggtggagttaaagac

SEQ ID NO: 67199 - DNA, 17 bp, Homo Sapiens
tggtggagttaaagact

SEQ ID NO: 67200 - DNA, 18 bp, Homo Sapiens
tggtggagttaaagactt

SEQ ID NO: 67201 - DNA, 19 bp, Homo Sapiens
tggtggagttaaagacttt

SEQ ID NO: 67202 - DNA, 20 bp, Homo Sapiens
tggtggagttaaagactttt

SEQ ID NO: 67203 - DNA, 20 bp, Homo Sapiens
tggtggtctagtggttagga

SEQ ID NO: 67204 - DNA, 21 bp, Homo Sapiens
tggtggtctagtggttaggat

SEQ ID NO: 67205 - DNA, 23 bp, Homo Sapiens
tggtggtctagtggttaggattc

SEQ ID NO: 67206 - DNA, 24 bp, Homo Sapiens
tggtggtctagtggttaggattcg

SEQ ID NO: 67207 - DNA, 25 bp, Homo Sapiens
tggtggtctagtggttaggattcgg

SEQ ID NO: 67208 - DNA, 19 bp, Homo Sapiens
tggtggttcagtggtagaa

SEQ ID NO: 67209 - DNA, 22 bp, Homo Sapiens
tggtggttcagtggtagaattc

SEQ ID NO: 67210 - DNA, 23 bp, Homo Sapiens
tggtggttcagtggtagaattct

SEQ ID NO: 67211 - DNA, 24 bp, Homo Sapiens
tggtggttcagtggtagaattctc

SEQ ID NO: 67212 - DNA, 16 bp, Homo Sapiens
tggtgtaatggttagc

SEQ ID NO: 67213 - DNA, 19 bp, Homo Sapiens
tggtgtagtggtatcatgc

SEQ ID NO: 67214 - DNA, 20 bp, Homo Sapiens
tggtgtagtggtatcatgca

SEQ ID NO: 67215 - DNA, 23 bp, Homo Sapiens
tggtgtagtggtatcatgcaaga

SEQ ID NO: 67216 - DNA, 16 bp, Homo Sapiens
tggttagcactctgga

SEQ ID NO: 67217 - DNA, 18 bp, Homo Sapiens
tggttagcactctggact

SEQ ID NO: 67218 - DNA, 19 bp, Homo Sapiens
tggttagcactctggactc

SEQ ID NO: 67219 - DNA, 20 bp, Homo Sapiens
tggttagcactctggactct

SEQ ID NO: 67220 - DNA, 21 bp, Homo Sapiens
tggttagcactctggactctg

SEQ ID NO: 67221 - DNA, 16 bp, Homo Sapiens
tggttaggattcggcg

SEQ ID NO: 67222 - DNA, 17 bp, Homo Sapiens
tggttaggattcggcgc

SEQ ID NO: 67223 - DNA, 18 bp, Homo Sapiens
tggttaggattcggcgct

SEQ ID NO: 67224 - DNA, 19 bp, Homo Sapiens
tggttaggattcggcgctc

SEQ ID NO: 67225 - DNA, 20 bp, Homo Sapiens
tggttaggattcggcgctct

SEQ ID NO: 67226 - DNA, 21 bp, Homo Sapiens
tggttaggattcggcgctctc

SEQ ID NO: 67227 - DNA, 22 bp, Homo Sapiens
tggttaggattcggcgctctca

SEQ ID NO: 67228 - DNA, 23 bp, Homo Sapiens
tggttaggattcggcgctctcac

SEQ ID NO: 67229 - DNA, 16 bp, Homo Sapiens
tggttagtactctgcg

SEQ ID NO: 67230 - DNA, 18 bp, Homo Sapiens
tggttagtactctgcgtt

SEQ ID NO: 67231 - DNA, 19 bp, Homo Sapiens
tggttagtactctgcgttg

SEQ ID NO: 67232 - DNA, 20 bp, Homo Sapiens
tggttagtactctgcgttgt

SEQ ID NO: 67233 - DNA, 24 bp, Homo Sapiens
tggttatacccttcccgtactacc

SEQ ID NO: 67234 - DNA, 16 bp, Homo Sapiens
tggttatcacgttcgc

SEQ ID NO: 67235 - DNA, 16 bp, Homo Sapiens
tggttcagtggtagaa

SEQ ID NO: 67236 - DNA, 17 bp, Homo Sapiens
tggttcagtggtagaat

SEQ ID NO: 67237 - DNA, 19 bp, Homo Sapiens
tggttcagtggtagaattc

SEQ ID NO: 67238 - DNA, 20 bp, Homo Sapiens
tggttcagtggtagaattct

SEQ ID NO: 67239 - DNA, 21 bp, Homo Sapiens
tggttcagtggtagaattctc

SEQ ID NO: 67240 - DNA, 23 bp, Homo Sapiens
tggttcagtggtagaattctcgc

SEQ ID NO: 67241 - DNA, 24 bp, Homo Sapiens
tggttcagtggtagaattctcgcc

SEQ ID NO: 67242 - DNA, 16 bp, Homo Sapiens
tggttgtagtccgtgc

SEQ ID NO: 67243 - DNA, 17 bp, Homo Sapiens
tggttgtagtccgtgcg

SEQ ID NO: 67244 - DNA, 18 bp, Homo Sapiens
tggttgtagtccgtgcga

SEQ ID NO: 67245 - DNA, 19 bp, Homo Sapiens
tggttgtagtccgtgcgag

SEQ ID NO: 67246 - DNA, 20 bp, Homo Sapiens
tggttgtagtccgtgcgaga

SEQ ID NO: 67247 - DNA, 21 bp, Homo Sapiens
tggttgtagtccgtgcgagaa

SEQ ID NO: 67248 - DNA, 22 bp, Homo Sapiens
tggttgtagtccgtgcgagaat

SEQ ID NO: 67249 - DNA, 23 bp, Homo Sapiens
tggttgtagtccgtgcgagaata

SEQ ID NO: 67250 - DNA, 24 bp, Homo Sapiens
tggttgtagtccgtgcgagaatac

SEQ ID NO: 67251 - DNA, 25 bp, Homo Sapiens
tggttgtagtccgtgcgagaatacc

SEQ ID NO: 67252 - DNA, 19 bp, Homo Sapiens
tgtaaaccggagatgaaaa

SEQ ID NO: 67253 - DNA, 20 bp, Homo Sapiens
tgtaaaccggagatgaaaac

SEQ ID NO: 67254 - DNA, 21 bp, Homo Sapiens
tgtaaaccggagatgaaaacc

SEQ ID NO: 67255 - DNA, 20 bp, Homo Sapiens
tgtaatggttagcactctgg

SEQ ID NO: 67256 - DNA, 19 bp, Homo Sapiens
tgtagctcagtggtagagc

SEQ ID NO: 67257 - DNA, 19 bp, Homo Sapiens
tgtagtccgtgcgagaata

SEQ ID NO: 67258 - DNA, 20 bp, Homo Sapiens
tgtagtccgtgcgagaatac

SEQ ID NO: 67259 - DNA, 21 bp, Homo Sapiens
tgtagtccgtgcgagaatacc

SEQ ID NO: 67260 - DNA, 22 bp, Homo Sapiens
tgtagtccgtgcgagaatacca

SEQ ID NO: 67261 - DNA, 17 bp, Homo Sapiens
tgtctaacaacatggct

SEQ ID NO: 67262 - DNA, 25 bp, Homo Sapiens
tgtctaacaacatggctttctcacc

SEQ ID NO: 67263 - DNA, 16 bp, Homo Sapiens
tgtgaatctgacaaca

SEQ ID NO: 67264 - DNA, 17 bp, Homo Sapiens
tgtgaatctgacaacag

SEQ ID NO: 67265 - DNA, 18 bp, Homo Sapiens
tgtgaatctgacaacaga

SEQ ID NO: 67266 - DNA, 19 bp, Homo Sapiens
tgtgaatctgacaacagag

SEQ ID NO: 67267 - DNA, 20 bp, Homo Sapiens
tgtgctttgcacgcgtgggt

SEQ ID NO: 67268 - DNA, 19 bp, Homo Sapiens
tgtgggttcgagtcccatc

SEQ ID NO: 67269 - DNA, 19 bp, Homo Sapiens
tgtgggtttaagtcccatt

SEQ ID NO: 67270 - DNA, 16 bp, Homo Sapiens
tgtttagacgggctca

SEQ ID NO: 67271 - DNA, 17 bp, Homo Sapiens
tgtttagacgggctcac

SEQ ID NO: 67272 - DNA, 18 bp, Homo Sapiens
tgtttagacgggctcaca

SEQ ID NO: 67273 - DNA, 19 bp, Homo Sapiens
tgtttagacgggctcacat

SEQ ID NO: 67274 - DNA, 20 bp, Homo Sapiens
tgtttagacgggctcacatc

SEQ ID NO: 67275 - DNA, 21 bp, Homo Sapiens
tgtttagacgggctcacatca

SEQ ID NO: 67276 - DNA, 22 bp, Homo Sapiens
tgtttagacgggctcacatcac

SEQ ID NO: 67277 - DNA, 23 bp, Homo Sapiens
tgtttagacgggctcacatcacc

SEQ ID NO: 67278 - DNA, 24 bp, Homo Sapiens
tgtttagacgggctcacatcaccc

SEQ ID NO: 67279 - DNA, 20 bp, Homo Sapiens
tgtttgtgggtttaagtccc

SEQ ID NO: 67280 - DNA, 21 bp, Homo Sapiens
tgtttgtgggtttaagtccca

SEQ ID NO: 67281 - DNA, 23 bp, Homo Sapiens
tgtttgtgggtttaagtcccatt

SEQ ID NO: 67282 - DNA, 18 bp, Homo Sapiens
ttaaacccccttatttct

SEQ ID NO: 67283 - DNA, 19 bp, Homo Sapiens
ttaaacccccttatttcta

SEQ ID NO: 67284 - DNA, 20 bp, Homo Sapiens
ttaaacccccttatttctac

SEQ ID NO: 67285 - DNA, 21 bp, Homo Sapiens
ttaaacccccttatttctacc

SEQ ID NO: 67286 - DNA, 22 bp, Homo Sapiens
ttaaacccccttatttctacca

SEQ ID NO: 67287 - DNA, 19 bp, Homo Sapiens
ttaaagactttttctctga

SEQ ID NO: 67288 - DNA, 20 bp, Homo Sapiens
ttaaagactttttctctgac

SEQ ID NO: 67289 - DNA, 21 bp, Homo Sapiens
ttaaagactttttctctgacc

SEQ ID NO: 67290 - DNA, 22 bp, Homo Sapiens
ttaaagactttttctctgacca

SEQ ID NO: 67291 - DNA, 17 bp, Homo Sapiens
ttaaagattaagagaac

SEQ ID NO: 67292 - DNA, 18 bp, Homo Sapiens
ttaaagattaagagaacc

SEQ ID NO: 67293 - DNA, 19 bp, Homo Sapiens
ttaaagattaagagaacca

SEQ ID NO: 67294 - DNA, 20 bp, Homo Sapiens
ttaaagattaagagaaccaa

SEQ ID NO: 67295 - DNA, 21 bp, Homo Sapiens
ttaaagattaagagaaccaac

SEQ ID NO: 67296 - DNA, 18 bp, Homo Sapiens
ttaaagtggctgatttgc

SEQ ID NO: 67297 - DNA, 19 bp, Homo Sapiens
ttaaatacagaccaagagc

SEQ ID NO: 67298 - DNA, 24 bp, Homo Sapiens
ttaaattataggctaaatcctata

SEQ ID NO: 67299 - DNA, 22 bp, Homo Sapiens
ttaaattatgataatcatattt

SEQ ID NO: 67300 - DNA, 25 bp, Homo Sapiens
ttaaattatgataatcatatttacc

SEQ ID NO: 67301 - DNA, 17 bp, Homo Sapiens
ttaacacaaagcaccca

SEQ ID NO: 67302 - DNA, 17 bp, Homo Sapiens
ttaaccaaaacatcaga

SEQ ID NO: 67303 - DNA, 20 bp, Homo Sapiens
ttaactaagtgtttgtgggt

SEQ ID NO: 67304 - DNA, 21 bp, Homo Sapiens
ttaactaagtgtttgtgggtt

SEQ ID NO: 67305 - DNA, 22 bp, Homo Sapiens
ttaactaagtgtttgtgggttt

SEQ ID NO: 67306 - DNA, 17 bp, Homo Sapiens
ttaactagttttgacaa

SEQ ID NO: 67307 - DNA, 18 bp, Homo Sapiens
ttaactagttttgacaac

SEQ ID NO: 67308 - DNA, 16 bp, Homo Sapiens
ttaacttgaccgctct

SEQ ID NO: 67309 - DNA, 17 bp, Homo Sapiens
ttaacttgaccgctctg

SEQ ID NO: 67310 - DNA, 18 bp, Homo Sapiens
ttaacttgaccgctctga

SEQ ID NO: 67311 - DNA, 19 bp, Homo Sapiens
ttaacttgaccgctctgac

SEQ ID NO: 67312 - DNA, 20 bp, Homo Sapiens
ttaacttgaccgctctgacc

SEQ ID NO: 67313 - DNA, 21 bp, Homo Sapiens
ttaacttgaccgctctgacca

SEQ ID NO: 67314 - DNA, 21 bp, Homo Sapiens
ttaagtcccattggtctagcc

SEQ ID NO: 67315 - DNA, 17 bp, Homo Sapiens
ttaagttaaagattaag

SEQ ID NO: 67316 - DNA, 18 bp, Homo Sapiens
ttaagttaaagattaaga

SEQ ID NO: 67317 - DNA, 20 bp, Homo Sapiens
ttaagttaaagattaagaga

SEQ ID NO: 67318 - DNA, 23 bp, Homo Sapiens
ttaagttaaagattaagagaacc

SEQ ID NO: 67319 - DNA, 16 bp, Homo Sapiens
ttacacttaggagatt

SEQ ID NO: 67320 - DNA, 18 bp, Homo Sapiens
ttacacttaggagatttc

SEQ ID NO: 67321 - DNA, 19 bp, Homo Sapiens
ttacacttaggagatttca

SEQ ID NO: 67322 - DNA, 20 bp, Homo Sapiens
ttacacttaggagatttcaa

SEQ ID NO: 67323 - DNA, 21 bp, Homo Sapiens
ttacacttaggagatttcaac

SEQ ID NO: 67324 - DNA, 22 bp, Homo Sapiens
ttacacttaggagatttcaact

SEQ ID NO: 67325 - DNA, 16 bp, Homo Sapiens
ttacagtcagaggttc

SEQ ID NO: 67326 - DNA, 17 bp, Homo Sapiens
ttacagtcagaggttca

SEQ ID NO: 67327 - DNA, 20 bp, Homo Sapiens
ttacctcctcaaagcaatac

SEQ ID NO: 67328 - DNA, 20 bp, Homo Sapiens
ttacgaccccttatttaccc

SEQ ID NO: 67329 - DNA, 21 bp, Homo Sapiens
ttacgaccccttatttacccc

SEQ ID NO: 67330 - DNA, 22 bp, Homo Sapiens
ttacgaccccttatttacccca

SEQ ID NO: 67331 - DNA, 18 bp, Homo Sapiens
ttagaatcttagctttgg

SEQ ID NO: 67332 - DNA, 16 bp, Homo Sapiens
ttagacgggctcacat

SEQ ID NO: 67333 - DNA, 17 bp, Homo Sapiens
ttagacgggctcacatc

SEQ ID NO: 67334 - DNA, 18 bp, Homo Sapiens
ttagacgggctcacatca

SEQ ID NO: 67335 - DNA, 19 bp, Homo Sapiens
ttagacgggctcacatcac

SEQ ID NO: 67336 - DNA, 20 bp, Homo Sapiens
ttagacgggctcacatcacc

SEQ ID NO: 67337 - DNA, 21 bp, Homo Sapiens
ttagacgggctcacatcaccc

SEQ ID NO: 67338 - DNA, 23 bp, Homo Sapiens
ttagacgggctcacatcacccca

SEQ ID NO: 67339 - DNA, 21 bp, Homo Sapiens
ttagagccagactgcctgggt

SEQ ID NO: 67340 - DNA, 22 bp, Homo Sapiens
ttagagccagactgcctgggtt

SEQ ID NO: 67341 - DNA, 23 bp, Homo Sapiens
ttagagccagactgcctgggttt

SEQ ID NO: 67342 - DNA, 17 bp, Homo Sapiens
ttagcactctggactct

SEQ ID NO: 67343 - DNA, 18 bp, Homo Sapiens
ttagcactctggactctg

SEQ ID NO: 67344 - DNA, 19 bp, Homo Sapiens
ttagcactctggactctga

SEQ ID NO: 67345 - DNA, 18 bp, Homo Sapiens
ttagcactctggactttg

SEQ ID NO: 67346 - DNA, 18 bp, Homo Sapiens
ttagcattaaccttttaa

SEQ ID NO: 67347 - DNA, 19 bp, Homo Sapiens
ttagcattaaccttttaag

SEQ ID NO: 67348 - DNA, 20 bp, Homo Sapiens
ttagcattaaccttttaagt

SEQ ID NO: 67349 - DNA, 16 bp, Homo Sapiens
ttaggagatttcaact

SEQ ID NO: 67350 - DNA, 17 bp, Homo Sapiens
ttaggagatttcaactt

SEQ ID NO: 67351 - DNA, 18 bp, Homo Sapiens
ttaggagatttcaactta

SEQ ID NO: 67352 - DNA, 19 bp, Homo Sapiens
ttaggagatttcaacttaa

SEQ ID NO: 67353 - DNA, 20 bp, Homo Sapiens
ttaggagatttcaacttaac

SEQ ID NO: 67354 - DNA, 21 bp, Homo Sapiens
ttaggagatttcaacttaact

SEQ ID NO: 67355 - DNA, 18 bp, Homo Sapiens
ttaggattcctggttttc

SEQ ID NO: 67356 - DNA, 16 bp, Homo Sapiens
ttaggattcggcgctc

SEQ ID NO: 67357 - DNA, 17 bp, Homo Sapiens
ttaggattcggcgctct

SEQ ID NO: 67358 - DNA, 18 bp, Homo Sapiens
ttaggattcggcgctctc

SEQ ID NO: 67359 - DNA, 19 bp, Homo Sapiens
ttaggattcggcgctctca

SEQ ID NO: 67360 - DNA, 21 bp, Homo Sapiens
ttaggcctctttttaccacca

SEQ ID NO: 67361 - DNA, 17 bp, Homo Sapiens
ttagggtgcttagctgt

SEQ ID NO: 67362 - DNA, 17 bp, Homo Sapiens
ttagtactctgcgttgt

SEQ ID NO: 67363 - DNA, 18 bp, Homo Sapiens
ttagtactctgcgttgtg

SEQ ID NO: 67364 - DNA, 19 bp, Homo Sapiens
ttatacccttcccgtacta

SEQ ID NO: 67365 - DNA, 20 bp, Homo Sapiens
ttatacccttcccgtactac

SEQ ID NO: 67366 - DNA, 21 bp, Homo Sapiens
ttatacccttcccgtactacc

SEQ ID NO: 67367 - DNA, 22 bp, Homo Sapiens
ttatacccttcccgtactacca

SEQ ID NO: 67368 - DNA, 24 bp, Homo Sapiens
ttatgataatcatatttaccaacc

SEQ ID NO: 67369 - DNA, 25 bp, Homo Sapiens
ttatgataatcatatttaccaacca

SEQ ID NO: 67370 - DNA, 17 bp, Homo Sapiens
ttatgtagcttacctcc

SEQ ID NO: 67371 - DNA, 18 bp, Homo Sapiens
ttatgtagcttacctcct

SEQ ID NO: 67372 - DNA, 16 bp, Homo Sapiens
ttcaaaaaagagtacc

SEQ ID NO: 67373 - DNA, 17 bp, Homo Sapiens
ttcaaaaaagagtacca

SEQ ID NO: 67374 - DNA, 17 bp, Homo Sapiens
ttcaaacctgccggggc

SEQ ID NO: 67375 - DNA, 19 bp, Homo Sapiens
ttcaaacctgccggggctt

SEQ ID NO: 67376 - DNA, 20 bp, Homo Sapiens
ttcaaacctgccggggcttc

SEQ ID NO: 67377 - DNA, 21 bp, Homo Sapiens
ttcaaacctgccggggcttcc

SEQ ID NO: 67378 - DNA, 20 bp, Homo Sapiens
ttcaacttaacttgaccgct

SEQ ID NO: 67379 - DNA, 21 bp, Homo Sapiens
ttcaacttaacttgaccgctc

SEQ ID NO: 67380 - DNA, 22 bp, Homo Sapiens
ttcaacttaacttgaccgctct

SEQ ID NO: 67381 - DNA, 24 bp, Homo Sapiens
ttcaacttaacttgaccgctctga

SEQ ID NO: 67382 - DNA, 25 bp, Homo Sapiens
ttcaacttaacttgaccgctctgac

SEQ ID NO: 67383 - DNA, 19 bp, Homo Sapiens
ttcaagtccctgttcgggc

SEQ ID NO: 67384 - DNA, 21 bp, Homo Sapiens
ttcaagtccctgttcgggcgc

SEQ ID NO: 67385 - DNA, 22 bp, Homo Sapiens
ttcaagtccctgttcgggcgcc

SEQ ID NO: 67386 - DNA, 16 bp, Homo Sapiens
ttcaggtcgcagtctc

SEQ ID NO: 67387 - DNA, 17 bp, Homo Sapiens
ttcaggtcgcagtctcc

SEQ ID NO: 67388 - DNA, 18 bp, Homo Sapiens
ttcaggtcgcagtctccc

SEQ ID NO: 67389 - DNA, 20 bp, Homo Sapiens
ttcagtggtagaattctcgc

SEQ ID NO: 67390 - DNA, 21 bp, Homo Sapiens
ttcagtggtagaattctcgcc

SEQ ID NO: 67391 - DNA, 16 bp, Homo Sapiens
ttccccgacggggagc

SEQ ID NO: 67392 - DNA, 18 bp, Homo Sapiens
ttccccgacggggagcca

SEQ ID NO: 67393 - DNA, 17 bp, Homo Sapiens
ttcccggccaacgcacc

SEQ ID NO: 67394 - DNA, 18 bp, Homo Sapiens
ttcccggccaacgcacca

SEQ ID NO: 67395 - DNA, 17 bp, Homo Sapiens
ttcccggccaatgcacc

SEQ ID NO: 67396 - DNA, 18 bp, Homo Sapiens
ttcccggccaatgcacca

SEQ ID NO: 67397 - DNA, 17 bp, Homo Sapiens
ttcccggcccatgcacc

SEQ ID NO: 67398 - DNA, 18 bp, Homo Sapiens
ttcccggcccatgcacca

SEQ ID NO: 67399 - DNA, 16 bp, Homo Sapiens
ttcccgggcggcgcac

SEQ ID NO: 67400 - DNA, 17 bp, Homo Sapiens
ttcccgggcggcgcacc

SEQ ID NO: 67401 - DNA, 18 bp, Homo Sapiens
ttcccgggcggcgcacca

SEQ ID NO: 67402 - DNA, 16 bp, Homo Sapiens
ttcccggtcagggaac

SEQ ID NO: 67403 - DNA, 17 bp, Homo Sapiens
ttcccggtcagggaacc

SEQ ID NO: 67404 - DNA, 18 bp, Homo Sapiens
ttcccggtcagggaacca

SEQ ID NO: 67405 - DNA, 19 bp, Homo Sapiens
ttccggatcagaagattga

SEQ ID NO: 67406 - DNA, 20 bp, Homo Sapiens
ttccggatcagaagattgag

SEQ ID NO: 67407 - DNA, 16 bp, Homo Sapiens
ttccggctcgaaggac

SEQ ID NO: 67408 - DNA, 17 bp, Homo Sapiens
ttccggctcgaaggacc

SEQ ID NO: 67409 - DNA, 18 bp, Homo Sapiens
ttccggctcgaaggacca

SEQ ID NO: 67410 - DNA, 20 bp, Homo Sapiens
ttccgggttcgagtcccggc

SEQ ID NO: 67411 - DNA, 21 bp, Homo Sapiens
ttccgggttcgagtcccggcg

SEQ ID NO: 67412 - DNA, 17 bp, Homo Sapiens
ttccgtagtgtagtggt

SEQ ID NO: 67413 - DNA, 21 bp, Homo Sapiens
ttccgtagtgtagtggttatc

SEQ ID NO: 67414 - DNA, 17 bp, Homo Sapiens
ttcctcttcttaacacc

SEQ ID NO: 67415 - DNA, 18 bp, Homo Sapiens
ttccttccttttttgcca

SEQ ID NO: 67416 - DNA, 20 bp, Homo Sapiens
ttcgaatccgagtcacggca

SEQ ID NO: 67417 - DNA, 22 bp, Homo Sapiens
ttcgaatccgagtcacggcacc

SEQ ID NO: 67418 - DNA, 21 bp, Homo Sapiens
ttcgactcattaaattatgat

SEQ ID NO: 67419 - DNA, 16 bp, Homo Sapiens
ttcgactcccggtgtg

SEQ ID NO: 67420 - DNA, 21 bp, Homo Sapiens
ttcgactcccggtgtgggaac

SEQ ID NO: 67421 - DNA, 22 bp, Homo Sapiens
ttcgactcccggtgtgggaacc

SEQ ID NO: 67422 - DNA, 23 bp, Homo Sapiens
ttcgactcccggtgtgggaacca

SEQ ID NO: 67423 - DNA, 18 bp, Homo Sapiens
ttcgagccccacgttggg

SEQ ID NO: 67424 - DNA, 17 bp, Homo Sapiens
ttcgatagctcagctgg

SEQ ID NO: 67425 - DNA, 17 bp, Homo Sapiens
ttcgatagctcagttgg

SEQ ID NO: 67426 - DNA, 23 bp, Homo Sapiens
ttcgatagctcagttggtagagc

SEQ ID NO: 67427 - DNA, 16 bp, Homo Sapiens
ttcgattcccgggcgg

SEQ ID NO: 67428 - DNA, 17 bp, Homo Sapiens
ttcgattcccgggcggc

SEQ ID NO: 67429 - DNA, 17 bp, Homo Sapiens
ttcgattcccggtcagg

SEQ ID NO: 67430 - DNA, 20 bp, Homo Sapiens
ttcgattcccggtcagggaa

SEQ ID NO: 67431 - DNA, 21 bp, Homo Sapiens
ttcgattcccggtcagggaac

SEQ ID NO: 67432 - DNA, 22 bp, Homo Sapiens
ttcgattcccggtcagggaacc

SEQ ID NO: 67433 - DNA, 23 bp, Homo Sapiens
ttcgattccggctcgaaggacca

SEQ ID NO: 67434 - DNA, 21 bp, Homo Sapiens
ttcgattctcatagtcctagc

SEQ ID NO: 67435 - DNA, 22 bp, Homo Sapiens
ttcgattctcatagtcctagcc

SEQ ID NO: 67436 - DNA, 17 bp, Homo Sapiens
ttctcatagtcctagcc

SEQ ID NO: 67437 - DNA, 18 bp, Homo Sapiens
ttctcatagtcctagcca

SEQ ID NO: 67438 - DNA, 20 bp, Homo Sapiens
ttctcgcctgccacgcggga

SEQ ID NO: 67439 - DNA, 17 bp, Homo Sapiens
ttctcgctggggcctcc

SEQ ID NO: 67440 - DNA, 18 bp, Homo Sapiens
ttctcgctggggcctcca

SEQ ID NO: 67441 - DNA, 22 bp, Homo Sapiens
ttgaatccagcgatccgagttc

SEQ ID NO: 67442 - DNA, 20 bp, Homo Sapiens
ttgacaacattcaaaaaaga

SEQ ID NO: 67443 - DNA, 16 bp, Homo Sapiens
ttgaccgctctgacca

SEQ ID NO: 67444 - DNA, 17 bp, Homo Sapiens
ttgagggttcgagtccc

SEQ ID NO: 67445 - DNA, 18 bp, Homo Sapiens
ttgagggttcgagtccct

SEQ ID NO: 67446 - DNA, 16 bp, Homo Sapiens
ttgatagagtaaataa

SEQ ID NO: 67447 - DNA, 17 bp, Homo Sapiens
ttgatagagtaaataat

SEQ ID NO: 67448 - DNA, 20 bp, Homo Sapiens
ttgatagagtaaataatagg

SEQ ID NO: 67449 - DNA, 21 bp, Homo Sapiens
ttgatagagtaaataatagga

SEQ ID NO: 67450 - DNA, 17 bp, Homo Sapiens
ttgattagggtgcttag

SEQ ID NO: 67451 - DNA, 19 bp, Homo Sapiens
ttgcaaattcgaagaagca

SEQ ID NO: 67452 - DNA, 20 bp, Homo Sapiens
ttgcaaattcgaagaagcag

SEQ ID NO: 67453 - DNA, 20 bp, Homo Sapiens
ttgcaatacttaatttctgc

SEQ ID NO: 67454 - DNA, 21 bp, Homo Sapiens
ttgcaatacttaatttctgcc

SEQ ID NO: 67455 - DNA, 22 bp, Homo Sapiens
ttgcaatacttaatttctgcca

SEQ ID NO: 67456 - DNA, 20 bp, Homo Sapiens
ttggggggttcgattccttc

SEQ ID NO: 67457 - DNA, 21 bp, Homo Sapiens
ttggggggttcgattccttcc

SEQ ID NO: 67458 - DNA, 18 bp, Homo Sapiens
ttgggtccgagaggtccc

SEQ ID NO: 67459 - DNA, 20 bp, Homo Sapiens
ttgggtccgagaggtcccgg

SEQ ID NO: 67460 - DNA, 18 bp, Homo Sapiens
ttgggtgcgagaggtccc

SEQ ID NO: 67461 - DNA, 20 bp, Homo Sapiens
ttgggtgcgagaggtcccgg

SEQ ID NO: 67462 - DNA, 16 bp, Homo Sapiens
ttggtcgtggttgtag

SEQ ID NO: 67463 - DNA, 17 bp, Homo Sapiens
ttggtcgtggttgtagt

SEQ ID NO: 67464 - DNA, 18 bp, Homo Sapiens
ttggtcgtggttgtagtc

SEQ ID NO: 67465 - DNA, 19 bp, Homo Sapiens
ttggtcgtggttgtagtcc

SEQ ID NO: 67466 - DNA, 20 bp, Homo Sapiens
ttggtcgtggttgtagtccg

SEQ ID NO: 67467 - DNA, 21 bp, Homo Sapiens
ttggtcgtggttgtagtccgt

SEQ ID NO: 67468 - DNA, 22 bp, Homo Sapiens
ttggtcgtggttgtagtccgtg

SEQ ID NO: 67469 - DNA, 23 bp, Homo Sapiens
ttggtcgtggttgtagtccgtgc

SEQ ID NO: 67470 - DNA, 24 bp, Homo Sapiens
ttggtcgtggttgtagtccgtgcg

SEQ ID NO: 67471 - DNA, 25 bp, Homo Sapiens
ttggtcgtggttgtagtccgtgcga

SEQ ID NO: 67472 - DNA, 17 bp, Homo Sapiens
ttggtgcaactccaaat

SEQ ID NO: 67473 - DNA, 24 bp, Homo Sapiens
ttggtgcaactccaaataaaagta

SEQ ID NO: 67474 - DNA, 25 bp, Homo Sapiens
ttggtggtatagtggttagcatagc

SEQ ID NO: 67475 - DNA, 19 bp, Homo Sapiens
ttggtggttcagtggtaga

SEQ ID NO: 67476 - DNA, 20 bp, Homo Sapiens
ttggtggttcagtggtagaa

SEQ ID NO: 67477 - DNA, 21 bp, Homo Sapiens
ttggtggttcagtggtagaat

SEQ ID NO: 67478 - DNA, 22 bp, Homo Sapiens
ttggtggttcagtggtagaatt

SEQ ID NO: 67479 - DNA, 23 bp, Homo Sapiens
ttggtggttcagtggtagaattc

SEQ ID NO: 67480 - DNA, 24 bp, Homo Sapiens
ttggtggttcagtggtagaattct

SEQ ID NO: 67481 - DNA, 25 bp, Homo Sapiens
ttggtggttcagtggtagaattctc

SEQ ID NO: 67482 - DNA, 25 bp, Homo Sapiens
ttggttatacccttcccgtactacc

SEQ ID NO: 67483 - DNA, 16 bp, Homo Sapiens
ttgtaaaccggagatg

SEQ ID NO: 67484 - DNA, 18 bp, Homo Sapiens
ttgtaaaccggagatgaa

SEQ ID NO: 67485 - DNA, 19 bp, Homo Sapiens
ttgtaaaccggagatgaaa

SEQ ID NO: 67486 - DNA, 20 bp, Homo Sapiens
ttgtaaaccggagatgaaaa

SEQ ID NO: 67487 - DNA, 21 bp, Homo Sapiens
ttgtaaaccggagatgaaaac

SEQ ID NO: 67488 - DNA, 22 bp, Homo Sapiens
ttgtaaaccggagatgaaaacc

SEQ ID NO: 67489 - DNA, 23 bp, Homo Sapiens
ttgtaaaccggagatgaaaacct

SEQ ID NO: 67490 - DNA, 17 bp, Homo Sapiens
ttgtagtccgtgcgaga

SEQ ID NO: 67491 - DNA, 18 bp, Homo Sapiens
ttgtagtccgtgcgagaa

SEQ ID NO: 67492 - DNA, 19 bp, Homo Sapiens
ttgtagtccgtgcgagaat

SEQ ID NO: 67493 - DNA, 20 bp, Homo Sapiens
ttgtagtccgtgcgagaata

SEQ ID NO: 67494 - DNA, 21 bp, Homo Sapiens
ttgtagtccgtgcgagaatac

SEQ ID NO: 67495 - DNA, 22 bp, Homo Sapiens
ttgtagtccgtgcgagaatacc

SEQ ID NO: 67496 - DNA, 23 bp, Homo Sapiens
ttgtagtccgtgcgagaatacca

SEQ ID NO: 67497 - DNA, 20 bp, Homo Sapiens
ttgtcaaagttaaattatag

SEQ ID NO: 67498 - DNA, 16 bp, Homo Sapiens
ttgtgaatctgacaac

SEQ ID NO: 67499 - DNA, 17 bp, Homo Sapiens
ttgtgaatctgacaaca

SEQ ID NO: 67500 - DNA, 18 bp, Homo Sapiens
ttgtgaatctgacaacag

SEQ ID NO: 67501 - DNA, 19 bp, Homo Sapiens
ttgtgaatctgacaacaga

SEQ ID NO: 67502 - DNA, 20 bp, Homo Sapiens
ttgtgaatctgacaacagag

SEQ ID NO: 67503 - DNA, 21 bp, Homo Sapiens
ttgtgaatctgacaacagagg

SEQ ID NO: 67504 - DNA, 22 bp, Homo Sapiens
ttgtgaatctgacaacagaggc

SEQ ID NO: 67505 - DNA, 23 bp, Homo Sapiens
ttgtgaatctgacaacagaggct

SEQ ID NO: 67506 - DNA, 24 bp, Homo Sapiens
ttgtgaatctgacaacagaggctt

SEQ ID NO: 67507 - DNA, 25 bp, Homo Sapiens
ttgtgaatctgacaacagaggctta

SEQ ID NO: 67508 - DNA, 17 bp, Homo Sapiens
ttgtgggttcgagtccc

SEQ ID NO: 67509 - DNA, 20 bp, Homo Sapiens
ttgtgggttcgagtcccatc

SEQ ID NO: 67510 - DNA, 17 bp, Homo Sapiens
ttgtgggtttaagtccc

SEQ ID NO: 67511 - DNA, 20 bp, Homo Sapiens
ttgtgggtttaagtcccatt

SEQ ID NO: 67512 - DNA, 16 bp, Homo Sapiens
tttaaacaaaacgaat

SEQ ID NO: 67513 - DNA, 20 bp, Homo Sapiens
tttaaacaaaacgaatgatt

SEQ ID NO: 67514 - DNA, 17 bp, Homo Sapiens
tttaaattagaatctta

SEQ ID NO: 67515 - DNA, 18 bp, Homo Sapiens
tttaaattagaatcttag

SEQ ID NO: 67516 - DNA, 19 bp, Homo Sapiens
tttaaattagaatcttagc

SEQ ID NO: 67517 - DNA, 20 bp, Homo Sapiens
tttaaattagaatcttagct

SEQ ID NO: 67518 - DNA, 21 bp, Homo Sapiens
tttaaattagaatcttagctt

SEQ ID NO: 67519 - DNA, 18 bp, Homo Sapiens
tttaaccaaaacatcaga

SEQ ID NO: 67520 - DNA, 22 bp, Homo Sapiens
tttaagtcccattggtctagcc

SEQ ID NO: 67521 - DNA, 20 bp, Homo Sapiens
tttaagttaaagattaagag

SEQ ID NO: 67522 - DNA, 23 bp, Homo Sapiens
tttaagttaaagattaagagaac

SEQ ID NO: 67523 - DNA, 24 bp, Homo Sapiens
tttaagttaaagattaagagaacc

SEQ ID NO: 67524 - DNA, 25 bp, Homo Sapiens
tttaagttaaagattaagagaacca

SEQ ID NO: 67525 - DNA, 18 bp, Homo Sapiens
tttacacgcagaaggtcc

SEQ ID NO: 67526 - DNA, 16 bp, Homo Sapiens
tttacagtcagaggtt

SEQ ID NO: 67527 - DNA, 17 bp, Homo Sapiens
tttacagtcagaggttc

SEQ ID NO: 67528 - DNA, 18 bp, Homo Sapiens
tttacagtcagaggttca

SEQ ID NO: 67529 - DNA, 16 bp, Homo Sapiens
tttagacgggctcaca

SEQ ID NO: 67530 - DNA, 17 bp, Homo Sapiens
tttagacgggctcacat

SEQ ID NO: 67531 - DNA, 18 bp, Homo Sapiens
tttagacgggctcacatc

SEQ ID NO: 67532 - DNA, 19 bp, Homo Sapiens
tttagacgggctcacatca

SEQ ID NO: 67533 - DNA, 20 bp, Homo Sapiens
tttagacgggctcacatcac

SEQ ID NO: 67534 - DNA, 21 bp, Homo Sapiens
tttagacgggctcacatcacc

SEQ ID NO: 67535 - DNA, 24 bp, Homo Sapiens
tttagacgggctcacatcacccca

SEQ ID NO: 67536 - DNA, 17 bp, Homo Sapiens
tttaggctccagtcatt

SEQ ID NO: 67537 - DNA, 21 bp, Homo Sapiens
tttaggctccagtcatttcga

SEQ ID NO: 67538 - DNA, 18 bp, Homo Sapiens
tttatgtagcttacctcc

SEQ ID NO: 67539 - DNA, 16 bp, Homo Sapiens
tttcaacttaacttga

SEQ ID NO: 67540 - DNA, 17 bp, Homo Sapiens
tttcaacttaacttgac

SEQ ID NO: 67541 - DNA, 18 bp, Homo Sapiens
tttcaacttaacttgacc

SEQ ID NO: 67542 - DNA, 20 bp, Homo Sapiens
tttcaacttaacttgaccgc

SEQ ID NO: 67543 - DNA, 21 bp, Homo Sapiens
tttcaacttaacttgaccgct

SEQ ID NO: 67544 - DNA, 22 bp, Homo Sapiens
tttcaacttaacttgaccgctc

SEQ ID NO: 67545 - DNA, 23 bp, Homo Sapiens
tttcaacttaacttgaccgctct

SEQ ID NO: 67546 - DNA, 17 bp, Homo Sapiens
tttcatattgaattgca

SEQ ID NO: 67547 - DNA, 18 bp, Homo Sapiens
tttccgtagtgtagtggt

SEQ ID NO: 67548 - DNA, 22 bp, Homo Sapiens
tttccgtagtgtagtggttatc

SEQ ID NO: 67549 - DNA, 20 bp, Homo Sapiens
tttgacaacattcaaaaaag

SEQ ID NO: 67550 - DNA, 21 bp, Homo Sapiens
tttgacaacattcaaaaaaga

SEQ ID NO: 67551 - DNA, 17 bp, Homo Sapiens
tttgatagagtaaataa

SEQ ID NO: 67552 - DNA, 18 bp, Homo Sapiens
tttgatagagtaaataat

SEQ ID NO: 67553 - DNA, 22 bp, Homo Sapiens
tttgatagagtaaataatagga

SEQ ID NO: 67554 - DNA, 24 bp, Homo Sapiens
tttgatagagtaaataataggagc

SEQ ID NO: 67555 - DNA, 16 bp, Homo Sapiens
tttgcagtccttacca

SEQ ID NO: 67556 - DNA, 22 bp, Homo Sapiens
tttggggggttcgattccttcc

SEQ ID NO: 67557 - DNA, 18 bp, Homo Sapiens
tttgggtccgagaggtcc

SEQ ID NO: 67558 - DNA, 19 bp, Homo Sapiens
tttgggtccgagaggtccc

SEQ ID NO: 67559 - DNA, 21 bp, Homo Sapiens
tttgggtccgagaggtcccgg

SEQ ID NO: 67560 - DNA, 18 bp, Homo Sapiens
tttgggtgcgagaggtcc

SEQ ID NO: 67561 - DNA, 19 bp, Homo Sapiens
tttgggtgcgagaggtccc

SEQ ID NO: 67562 - DNA, 21 bp, Homo Sapiens
tttgggtgcgagaggtcccgg

SEQ ID NO: 67563 - DNA, 19 bp, Homo Sapiens
tttggtgcaactccaaata

SEQ ID NO: 67564 - DNA, 25 bp, Homo Sapiens
tttggtgcaactccaaataaaagta

SEQ ID NO: 67565 - DNA, 18 bp, Homo Sapiens
tttgtgggtttaagtccc

SEQ ID NO: 67566 - DNA, 21 bp, Homo Sapiens
tttgtgggtttaagtcccatt

SEQ ID NO: 67567 - DNA, 16 bp, Homo Sapiens
ttttaaaggataacag

SEQ ID NO: 67568 - DNA, 17 bp, Homo Sapiens
ttttaaaggataacagc

SEQ ID NO: 67569 - DNA, 18 bp, Homo Sapiens
ttttaaaggataacagct

SEQ ID NO: 67570 - DNA, 21 bp, Homo Sapiens
ttttaagttaaagattaagag

SEQ ID NO: 67571 - DNA, 24 bp, Homo Sapiens
ttttaagttaaagattaagagaac

SEQ ID NO: 67572 - DNA, 25 bp, Homo Sapiens
ttttaagttaaagattaagagaacc

SEQ ID NO: 67573 - DNA, 17 bp, Homo Sapiens
ttttcatatcattggtc

SEQ ID NO: 67574 - DNA, 17 bp, Homo Sapiens
ttttcatattgaattgc

SEQ ID NO: 67575 - DNA, 18 bp, Homo Sapiens
ttttcatattgaattgca

SEQ ID NO: 67576 - DNA, 16 bp, Homo Sapiens
ttttccaaggacacca

SEQ ID NO: 67577 - DNA, 17 bp, Homo Sapiens
ttttgcagtccttacca

SEQ ID NO: 67578 - DNA, 18 bp, Homo Sapiens
ttttggtgcaactccaaa

SEQ ID NO: 67579 - DNA, 20 bp, Homo Sapiens
ttttggtgcaactccaaata

SEQ ID NO: 67580 - DNA, 18 bp, Homo Sapiens
tttttcatatcattggtc

SEQ ID NO: 67581 - DNA, 19 bp, Homo Sapiens
tttttcatatcattggtcg

SEQ ID NO: 67582 - DNA, 20 bp, Homo Sapiens
tttttcatatcattggtcgt

SEQ ID NO: 67583 - DNA, 16 bp, Homo Sapiens
tttttccaaggacacc

SEQ ID NO: 67584 - DNA, 17 bp, Homo Sapiens
tttttccaaggacacca

SEQ ID NO: 67585 - DNA, 17 bp, Homo Sapiens
aaaaagtcatggaggcc

SEQ ID NO: 67586 - DNA, 22 bp, Homo Sapiens
aaaacttaaaactttacagtca

SEQ ID NO: 67587 - DNA, 17 bp, Homo Sapiens
aaacatcagattgtgaa

SEQ ID NO: 67588 - DNA, 22 bp, Homo Sapiens
aaaccgaagatcacgggttcga

SEQ ID NO: 67589 - DNA, 19 bp, Homo Sapiens
aaacctgccggggcttcca

SEQ ID NO: 67590 - DNA, 20 bp, Homo Sapiens
aaagtggctgatttgcgttc

SEQ ID NO: 67591 - DNA, 18 bp, Homo Sapiens
aaatctcggtggaacctc

SEQ ID NO: 67592 - DNA, 19 bp, Homo Sapiens
aaatctcggtgggacctcc

SEQ ID NO: 67593 - DNA, 20 bp, Homo Sapiens
aaatctcggtgggacctcca

SEQ ID NO: 67594 - DNA, 19 bp, Homo Sapiens
aaccaggggtcgcgagttc

SEQ ID NO: 67595 - DNA, 18 bp, Homo Sapiens
aaccccactcctggtacc

SEQ ID NO: 67596 - DNA, 19 bp, Homo Sapiens
aaccctgctcgctgcgcca

SEQ ID NO: 67597 - DNA, 18 bp, Homo Sapiens
aaccgggcagaaacacca

SEQ ID NO: 67598 - DNA, 18 bp, Homo Sapiens
aacctgccggggcttcca

SEQ ID NO: 67599 - DNA, 17 bp, Homo Sapiens
aacgaatgatttcgact

SEQ ID NO: 67600 - DNA, 17 bp, Homo Sapiens
aactaagtgtttgtggg

SEQ ID NO: 67601 - DNA, 20 bp, Homo Sapiens
aacttaaaactttacagtca

SEQ ID NO: 67602 - DNA, 21 bp, Homo Sapiens
aacttaaaactttacagtcag

SEQ ID NO: 67603 - DNA, 22 bp, Homo Sapiens
aacttaaaactttacagtcaga

SEQ ID NO: 67604 - DNA, 16 bp, Homo Sapiens
aagaggtccctggttc

SEQ ID NO: 67605 - DNA, 24 bp, Homo Sapiens
aagattccaggttcgactcctggc

SEQ ID NO: 67606 - DNA, 24 bp, Homo Sapiens
aagattctaggttcgactcctggc

SEQ ID NO: 67607 - DNA, 21 bp, Homo Sapiens
aagattgagggttcgagtccc

SEQ ID NO: 67608 - DNA, 25 bp, Homo Sapiens
aagcacccaacttacacttaggaga

SEQ ID NO: 67609 - DNA, 20 bp, Homo Sapiens
aagctatcgggcccataccc

SEQ ID NO: 67610 - DNA, 19 bp, Homo Sapiens
aaggctgcgtgttcgaatc

SEQ ID NO: 67611 - DNA, 25 bp, Homo Sapiens
aagggcttagcttaattaaagtggc

SEQ ID NO: 67612 - DNA, 24 bp, Homo Sapiens
aaggttgtgggttcgaatcccacc

SEQ ID NO: 67613 - DNA, 20 bp, Homo Sapiens
aagtcccattggtctagcca

SEQ ID NO: 67614 - DNA, 20 bp, Homo Sapiens
aagtccctgttcgggcgcca

SEQ ID NO: 67615 - DNA, 18 bp, Homo Sapiens
aagtggctgatttgcgtt

SEQ ID NO: 67616 - DNA, 20 bp, Homo Sapiens
aagtggctgatttgcgttca

SEQ ID NO: 67617 - DNA, 21 bp, Homo Sapiens
aagtggctgatttgcgttcag

SEQ ID NO: 67618 - DNA, 17 bp, Homo Sapiens
aagttctggtctccgga

SEQ ID NO: 67619 - DNA, 16 bp, Homo Sapiens
aatccagaggttccgg

SEQ ID NO: 67620 - DNA, 22 bp, Homo Sapiens
aatccattggggtttccccgcg

SEQ ID NO: 67621 - DNA, 23 bp, Homo Sapiens
aatccattggggtttccccgcgc

SEQ ID NO: 67622 - DNA, 25 bp, Homo Sapiens
aatccattggggtttccccgcgcag

SEQ ID NO: 67623 - DNA, 18 bp, Homo Sapiens
aatcccaccgctgccacc

SEQ ID NO: 67624 - DNA, 19 bp, Homo Sapiens
aatcccacttctgacacca

SEQ ID NO: 67625 - DNA, 19 bp, Homo Sapiens
aatcccagcggggcctcca

SEQ ID NO: 67626 - DNA, 17 bp, Homo Sapiens
aatcccagcggtgcctc

SEQ ID NO: 67627 - DNA, 20 bp, Homo Sapiens
aatccccggcatctccacca

SEQ ID NO: 67628 - DNA, 19 bp, Homo Sapiens
aatcccggacgagccccca

SEQ ID NO: 67629 - DNA, 17 bp, Homo Sapiens
aatccgagtcacggcac

SEQ ID NO: 67630 - DNA, 18 bp, Homo Sapiens
aatccggctcgaaggacc

SEQ ID NO: 67631 - DNA, 18 bp, Homo Sapiens
aatccggctcggaggacc

SEQ ID NO: 67632 - DNA, 19 bp, Homo Sapiens
aatccggctcggaggacca

SEQ ID NO: 67633 - DNA, 18 bp, Homo Sapiens
aatcctgccgactacgcc

SEQ ID NO: 67634 - DNA, 17 bp, Homo Sapiens
aatctcggtggaacctc

SEQ ID NO: 67635 - DNA, 18 bp, Homo Sapiens
aatctgaaggtcgtgagt

SEQ ID NO: 67636 - DNA, 22 bp, Homo Sapiens
aatctgaaggtcgtgagttcga

SEQ ID NO: 67637 - DNA, 25 bp, Homo Sapiens
aatctgacaacagaggcttacgacc

SEQ ID NO: 67638 - DNA, 20 bp, Homo Sapiens
aatgccgaggttgtgagttc

SEQ ID NO: 67639 - DNA, 16 bp, Homo Sapiens
aatggataaggcactg

SEQ ID NO: 67640 - DNA, 16 bp, Homo Sapiens
aatggataaggcatca

SEQ ID NO: 67641 - DNA, 18 bp, Homo Sapiens
aatggataaggcatcagc

SEQ ID NO: 67642 - DNA, 17 bp, Homo Sapiens
aatggataaggcattgg

SEQ ID NO: 67643 - DNA, 18 bp, Homo Sapiens
aatggataaggcattggc

SEQ ID NO: 67644 - DNA, 18 bp, Homo Sapiens
aatggatagcgcattgga

SEQ ID NO: 67645 - DNA, 17 bp, Homo Sapiens
aatggttagcactctgg

SEQ ID NO: 67646 - DNA, 20 bp, Homo Sapiens
aatggttagcactctggact

SEQ ID NO: 67647 - DNA, 18 bp, Homo Sapiens
aattctcgcctgccacgc

SEQ ID NO: 67648 - DNA, 18 bp, Homo Sapiens
acaacatggctttctcac

SEQ ID NO: 67649 - DNA, 20 bp, Homo Sapiens
acaggagatcctgggttcga

SEQ ID NO: 67650 - DNA, 22 bp, Homo Sapiens
acatggtctagcggttaggatt

SEQ ID NO: 67651 - DNA, 19 bp, Homo Sapiens
accaaaacatcagattgtg

SEQ ID NO: 67652 - DNA, 20 bp, Homo Sapiens
accaaaacatcagattgtga

SEQ ID NO: 67653 - DNA, 23 bp, Homo Sapiens
accaaaacatcagattgtgaatc

SEQ ID NO: 67654 - DNA, 25 bp, Homo Sapiens
accagaatggccgagtggttaaggc

SEQ ID NO: 67655 - DNA, 17 bp, Homo Sapiens
accaggatggccgagtg

SEQ ID NO: 67656 - DNA, 25 bp, Homo Sapiens
accaggatggccgagtggttaaggc

SEQ ID NO: 67657 - DNA, 16 bp, Homo Sapiens
accctgctcgctgcgc

SEQ ID NO: 67658 - DNA, 17 bp, Homo Sapiens
accctgctcgctgcgcc

SEQ ID NO: 67659 - DNA, 19 bp, Homo Sapiens
accgaaaggttggtggttc

SEQ ID NO: 67660 - DNA, 18 bp, Homo Sapiens
accgaagatcacgggttc

SEQ ID NO: 67661 - DNA, 18 bp, Homo Sapiens
accgaagatcgcgggttc

SEQ ID NO: 67662 - DNA, 17 bp, Homo Sapiens
acctcagagggggcacc

SEQ ID NO: 67663 - DNA, 16 bp, Homo Sapiens
acgaatgatttcgact

SEQ ID NO: 67664 - DNA, 19 bp, Homo Sapiens
acgcgggaggcccgggttc

SEQ ID NO: 67665 - DNA, 19 bp, Homo Sapiens
actcctggctggctcgcca

SEQ ID NO: 67666 - DNA, 16 bp, Homo Sapiens
actctggactctgaat

SEQ ID NO: 67667 - DNA, 22 bp, Homo Sapiens
actctggactctgaatccagcg

SEQ ID NO: 67668 - DNA, 17 bp, Homo Sapiens
actctggactttgaatc

SEQ ID NO: 67669 - DNA, 18 bp, Homo Sapiens
actctggactttgaatcc

SEQ ID NO: 67670 - DNA, 21 bp, Homo Sapiens
acttaaaactttacagtcaga

SEQ ID NO: 67671 - DNA, 23 bp, Homo Sapiens
acttacacttaggagatttcaac

SEQ ID NO: 67672 - DNA, 24 bp, Homo Sapiens
agaaatatgtctgataaaagagtt

SEQ ID NO: 67673 - DNA, 16 bp, Homo Sapiens
agaagattccaggttc

SEQ ID NO: 67674 - DNA, 17 bp, Homo Sapiens
agaagattccaggttcg

SEQ ID NO: 67675 - DNA, 16 bp, Homo Sapiens
agaagattctaggttc

SEQ ID NO: 67676 - DNA, 16 bp, Homo Sapiens
agaagattgagggttc

SEQ ID NO: 67677 - DNA, 24 bp, Homo Sapiens
agaagattgagggttcgagtccct

SEQ ID NO: 67678 - DNA, 16 bp, Homo Sapiens
agaaggctgcgtgttc

SEQ ID NO: 67679 - DNA, 16 bp, Homo Sapiens
agaaggttgcgtgttc

SEQ ID NO: 67680 - DNA, 19 bp, Homo Sapiens
agaggcttacgacccctta

SEQ ID NO: 67681 - DNA, 16 bp, Homo Sapiens
agaggtcgatggatcg

SEQ ID NO: 67682 - DNA, 16 bp, Homo Sapiens
agaggttccgggttcg

SEQ ID NO: 67683 - DNA, 25 bp, Homo Sapiens
agaggttccgggttcgagtcccggc

SEQ ID NO: 67684 - DNA, 24 bp, Homo Sapiens
agagtggcgcagcggaagcgtgct

SEQ ID NO: 67685 - DNA, 21 bp, Homo Sapiens
agatcagaaggttgcgtgttc

SEQ ID NO: 67686 - DNA, 18 bp, Homo Sapiens
agatcgcgggttcgaacc

SEQ ID NO: 67687 - DNA, 23 bp, Homo Sapiens
agattctaggttcgactcctggc

SEQ ID NO: 67688 - DNA, 21 bp, Homo Sapiens
agattgagggttcgaatccct

SEQ ID NO: 67689 - DNA, 18 bp, Homo Sapiens
agattgagggttcgagtc

SEQ ID NO: 67690 - DNA, 17 bp, Homo Sapiens
agcatgagactcttaat

SEQ ID NO: 67691 - DNA, 18 bp, Homo Sapiens
agcatgagactcttaatc

SEQ ID NO: 67692 - DNA, 20 bp, Homo Sapiens
agcatgagactcttaatctc

SEQ ID NO: 67693 - DNA, 16 bp, Homo Sapiens
agcatgggactcttaa

SEQ ID NO: 67694 - DNA, 17 bp, Homo Sapiens
agcatgggactcttaat

SEQ ID NO: 67695 - DNA, 18 bp, Homo Sapiens
agcatttgactgcagatc

SEQ ID NO: 67696 - DNA, 17 bp, Homo Sapiens
agccagggattgtgggt

SEQ ID NO: 67697 - DNA, 18 bp, Homo Sapiens
agcccacccagggacgcc

SEQ ID NO: 67698 - DNA, 22 bp, Homo Sapiens
agccgtgatcgtatagtggtta

SEQ ID NO: 67699 - DNA, 18 bp, Homo Sapiens
agcggttaggattcctgg

SEQ ID NO: 67700 - DNA, 17 bp, Homo Sapiens
agctcagtcggtagagc

SEQ ID NO: 67701 - DNA, 23 bp, Homo Sapiens
aggagatttcaacttaacttgac

SEQ ID NO: 67702 - DNA, 23 bp, Homo Sapiens
aggatggccgagcggtctaaggc

SEQ ID NO: 67703 - DNA, 20 bp, Homo Sapiens
aggatggccgagtggtctaa

SEQ ID NO: 67704 - DNA, 20 bp, Homo Sapiens
aggatggggtgtgataggtg

SEQ ID NO: 67705 - DNA, 20 bp, Homo Sapiens
aggcattggcctcctaagcc

SEQ ID NO: 67706 - DNA, 18 bp, Homo Sapiens
aggctgcgtgttcgaatc

SEQ ID NO: 67707 - DNA, 25 bp, Homo Sapiens
aggcttacgaccccttatttacccc

SEQ ID NO: 67708 - DNA, 23 bp, Homo Sapiens
agggattgtgggttcgagtccca

SEQ ID NO: 67709 - DNA, 25 bp, Homo Sapiens
agggattgtgggttcgagtcccatc

SEQ ID NO: 67710 - DNA, 21 bp, Homo Sapiens
agggtcgtgggttcgagcccc

SEQ ID NO: 67711 - DNA, 24 bp, Homo Sapiens
agggtcgtgggttcgagccccacg

SEQ ID NO: 67712 - DNA, 17 bp, Homo Sapiens
agggttcgagtcccttc

SEQ ID NO: 67713 - DNA, 23 bp, Homo Sapiens
aggtcccgggttcaaatcccgga

SEQ ID NO: 67714 - DNA, 17 bp, Homo Sapiens
aggtcgatggatcgaaa

SEQ ID NO: 67715 - DNA, 18 bp, Homo Sapiens
aggtcgatggatcgaaac

SEQ ID NO: 67716 - DNA, 19 bp, Homo Sapiens
aggtcgcgggttcgaaccc

SEQ ID NO: 67717 - DNA, 20 bp, Homo Sapiens
aggtcgcgggttcgaacccc

SEQ ID NO: 67718 - DNA, 23 bp, Homo Sapiens
aggtcgcgggttcgaaccccgta

SEQ ID NO: 67719 - DNA, 20 bp, Homo Sapiens
aggtcgcgggttcgatcccc

SEQ ID NO: 67720 - DNA, 22 bp, Homo Sapiens
aggtcgctggttcgattccggc

SEQ ID NO: 67721 - DNA, 20 bp, Homo Sapiens
aggtcgtgagttcgagcctc

SEQ ID NO: 67722 - DNA, 20 bp, Homo Sapiens
aggtcgtgagttcgatcctc

SEQ ID NO: 67723 - DNA, 18 bp, Homo Sapiens
aggtgattttcatattga

SEQ ID NO: 67724 - DNA, 22 bp, Homo Sapiens
aggttccgggttcgagtcccgg

SEQ ID NO: 67725 - DNA, 20 bp, Homo Sapiens
aggttgtgggttcgaatccc

SEQ ID NO: 67726 - DNA, 23 bp, Homo Sapiens
aggttgtgggttcgaatcccacc

SEQ ID NO: 67727 - DNA, 18 bp, Homo Sapiens
agtaaataataggagctt

SEQ ID NO: 67728 - DNA, 19 bp, Homo Sapiens
agtaggtagcgcatcagtc

SEQ ID NO: 67729 - DNA, 18 bp, Homo Sapiens
agtcacgtcggggtcacc

SEQ ID NO: 67730 - DNA, 19 bp, Homo Sapiens
agtcacgtcggggtcacca

SEQ ID NO: 67731 - DNA, 19 bp, Homo Sapiens
agtcccatctggggtgcca

SEQ ID NO: 67732 - DNA, 19 bp, Homo Sapiens
agtcccatctgggtcgcca

SEQ ID NO: 67733 - DNA, 18 bp, Homo Sapiens
agtcccggcagagatgcc

SEQ ID NO: 67734 - DNA, 19 bp, Homo Sapiens
agtcccggcagagatgcca

SEQ ID NO: 67735 - DNA, 19 bp, Homo Sapiens
agtcccggcggagtcgcca

SEQ ID NO: 67736 - DNA, 19 bp, Homo Sapiens
agtccctgttcgggcgcca

SEQ ID NO: 67737 - DNA, 19 bp, Homo Sapiens
agtcccttcgtggtcgcca

SEQ ID NO: 67738 - DNA, 23 bp, Homo Sapiens
agtcggtagagcatcagactttt

SEQ ID NO: 67739 - DNA, 17 bp, Homo Sapiens
agtggctgatttgcgtt

SEQ ID NO: 67740 - DNA, 19 bp, Homo Sapiens
agtggctgatttgcgttca

SEQ ID NO: 67741 - DNA, 20 bp, Homo Sapiens
agtggctgatttgcgttcag

SEQ ID NO: 67742 - DNA, 17 bp, Homo Sapiens
agtggggttttgcagtc

SEQ ID NO: 67743 - DNA, 24 bp, Homo Sapiens
agtggggttttgcagtccttacca

SEQ ID NO: 67744 - DNA, 16 bp, Homo Sapiens
agtggtagaattctcg

SEQ ID NO: 67745 - DNA, 18 bp, Homo Sapiens
agtggtagagcatttgac

SEQ ID NO: 67746 - DNA, 17 bp, Homo Sapiens
agtggtagagcgcatgc

SEQ ID NO: 67747 - DNA, 20 bp, Homo Sapiens
agtggtatcatgcaagattc

SEQ ID NO: 67748 - DNA, 21 bp, Homo Sapiens
agtggtatcatgcaagattcc

SEQ ID NO: 67749 - DNA, 22 bp, Homo Sapiens
agtggttaggattcggcgctct

SEQ ID NO: 67750 - DNA, 19 bp, Homo Sapiens
agtggttagtactctgcgt

SEQ ID NO: 67751 - DNA, 17 bp, Homo Sapiens
agtggttatcacgttcg

SEQ ID NO: 67752 - DNA, 24 bp, Homo Sapiens
agttcaaatctcggtggaacctcc

SEQ ID NO: 67753 - DNA, 18 bp, Homo Sapiens
agttggtagagcatcaga

SEQ ID NO: 67754 - DNA, 19 bp, Homo Sapiens
agttggtagagcatcagac

SEQ ID NO: 67755 - DNA, 18 bp, Homo Sapiens
ataacccagaggtcgatg

SEQ ID NO: 67756 - DNA, 18 bp, Homo Sapiens
atacaacgatggtttttc

SEQ ID NO: 67757 - DNA, 18 bp, Homo Sapiens
atacccttcccgtactac

SEQ ID NO: 67758 - DNA, 21 bp, Homo Sapiens
atagctgccttccaagcagtt

SEQ ID NO: 67759 - DNA, 16 bp, Homo Sapiens
atcacgtcggggtcac

SEQ ID NO: 67760 - DNA, 19 bp, Homo Sapiens
atcagaagattccaggttc

SEQ ID NO: 67761 - DNA, 17 bp, Homo Sapiens
atccagcgatccgagtt

SEQ ID NO: 67762 - DNA, 17 bp, Homo Sapiens
atccaggtgccccctcc

SEQ ID NO: 67763 - DNA, 18 bp, Homo Sapiens
atcccaccagagtcgcca

SEQ ID NO: 67764 - DNA, 19 bp, Homo Sapiens
atcccacccagggacgcca

SEQ ID NO: 67765 - DNA, 16 bp, Homo Sapiens
atcccacttctgacac

SEQ ID NO: 67766 - DNA, 17 bp, Homo Sapiens
atcccagtagagcctcc

SEQ ID NO: 67767 - DNA, 18 bp, Homo Sapiens
atccccggcatctccacc

SEQ ID NO: 67768 - DNA, 18 bp, Homo Sapiens
atcccttcgtggttgcca

SEQ ID NO: 67769 - DNA, 16 bp, Homo Sapiens
atccggctcgaaggac

SEQ ID NO: 67770 - DNA, 19 bp, Homo Sapiens
atcctcacacggggcacca

SEQ ID NO: 67771 - DNA, 16 bp, Homo Sapiens
atcctgccgactacgc

SEQ ID NO: 67772 - DNA, 17 bp, Homo Sapiens
atcctgctcacagcgcc

SEQ ID NO: 67773 - DNA, 18 bp, Homo Sapiens
atcctgtcggctacgcca

SEQ ID NO: 67774 - DNA, 19 bp, Homo Sapiens
atctgaaggtcgtgagttc

SEQ ID NO: 67775 - DNA, 16 bp, Homo Sapiens
atctgacaacagaggc

SEQ ID NO: 67776 - DNA, 18 bp, Homo Sapiens
atctgacaacagaggctt

SEQ ID NO: 67777 - DNA, 19 bp, Homo Sapiens
atctgacaacagaggctta

SEQ ID NO: 67778 - DNA, 22 bp, Homo Sapiens
atctgacaacagaggcttacga

SEQ ID NO: 67779 - DNA, 19 bp, Homo Sapiens
atctgagggtccagggttt

SEQ ID NO: 67780 - DNA, 16 bp, Homo Sapiens
atgagactcttaatct

SEQ ID NO: 67781 - DNA, 16 bp, Homo Sapiens
atgaggccccgggttc

SEQ ID NO: 67782 - DNA, 16 bp, Homo Sapiens
atgaggtcccgggttc

SEQ ID NO: 67783 - DNA, 19 bp, Homo Sapiens
atggataacgcgtctgact

SEQ ID NO: 67784 - DNA, 17 bp, Homo Sapiens
atggataaggcactggc

SEQ ID NO: 67785 - DNA, 17 bp, Homo Sapiens
atggataaggcatcagc

SEQ ID NO: 67786 - DNA, 20 bp, Homo Sapiens
atggataaggcatcagcctc

SEQ ID NO: 67787 - DNA, 16 bp, Homo Sapiens
atggataaggcattgg

SEQ ID NO: 67788 - DNA, 17 bp, Homo Sapiens
atggataaggcattggc

SEQ ID NO: 67789 - DNA, 18 bp, Homo Sapiens
atggataaggcattggcc

SEQ ID NO: 67790 - DNA, 17 bp, Homo Sapiens
atggatagcgcattgga

SEQ ID NO: 67791 - DNA, 18 bp, Homo Sapiens
atggccgagcggtctaag

SEQ ID NO: 67792 - DNA, 16 bp, Homo Sapiens
atgggactcttaatcc

SEQ ID NO: 67793 - DNA, 17 bp, Homo Sapiens
atggtgtaatggttagc

SEQ ID NO: 67794 - DNA, 18 bp, Homo Sapiens
atgttggttatacccttc

SEQ ID NO: 67795 - DNA, 20 bp, Homo Sapiens
attagctcaaatggtagagc

SEQ ID NO: 67796 - DNA, 21 bp, Homo Sapiens
attccaggttcgactcctggc

SEQ ID NO: 67797 - DNA, 18 bp, Homo Sapiens
attccccgacggggagcc

SEQ ID NO: 67798 - DNA, 18 bp, Homo Sapiens
attcccggccaatgcacc

SEQ ID NO: 67799 - DNA, 16 bp, Homo Sapiens
attcccgggcggcgca

SEQ ID NO: 67800 - DNA, 18 bp, Homo Sapiens
attccttccttttttgcc

SEQ ID NO: 67801 - DNA, 19 bp, Homo Sapiens
attcggcgctctcaccgcc

SEQ ID NO: 67802 - DNA, 21 bp, Homo Sapiens
attctaggttcgactcctggc

SEQ ID NO: 67803 - DNA, 19 bp, Homo Sapiens
attctcatagtcctagcca

SEQ ID NO: 67804 - DNA, 18 bp, Homo Sapiens
attcttgcgacccgggtt

SEQ ID NO: 67805 - DNA, 21 bp, Homo Sapiens
attcttgcgacccgggttcga

SEQ ID NO: 67806 - DNA, 22 bp, Homo Sapiens
attcttgcgacccgggttcgat

SEQ ID NO: 67807 - DNA, 23 bp, Homo Sapiens
attcttgcgacccgggttcgatt

SEQ ID NO: 67808 - DNA, 18 bp, Homo Sapiens
attgagggttcgaatccc

SEQ ID NO: 67809 - DNA, 19 bp, Homo Sapiens
attgagggttcgaatccct

SEQ ID NO: 67810 - DNA, 21 bp, Homo Sapiens
attgagggttcgagtcccttc

SEQ ID NO: 67811 - DNA, 18 bp, Homo Sapiens
attggggtttccccgcgc

SEQ ID NO: 67812 - DNA, 22 bp, Homo Sapiens
attgtgaatctgacaacagagg

SEQ ID NO: 67813 - DNA, 24 bp, Homo Sapiens
attgtgaatctgacaacagaggct

SEQ ID NO: 67814 - DNA, 25 bp, Homo Sapiens
attgtgaatctgacaacagaggctt

SEQ ID NO: 67815 - DNA, 18 bp, Homo Sapiens
attgtgggttcgagtccc

SEQ ID NO: 67816 - DNA, 19 bp, Homo Sapiens
attgtgggttcgagtccca

SEQ ID NO: 67817 - DNA, 21 bp, Homo Sapiens
attgtgggttcgagtcccatc

SEQ ID NO: 67818 - DNA, 24 bp, Homo Sapiens
caaagcacccaacttacacttagg

SEQ ID NO: 67819 - DNA, 20 bp, Homo Sapiens
caaatccgggtgccccctcc

SEQ ID NO: 67820 - DNA, 19 bp, Homo Sapiens
caaatctcggtggaacctc

SEQ ID NO: 67821 - DNA, 20 bp, Homo Sapiens
caaatctcggtgggacctcc

SEQ ID NO: 67822 - DNA, 21 bp, Homo Sapiens
caaatctcggtgggacctcca

SEQ ID NO: 67823 - DNA, 18 bp, Homo Sapiens
caaattcgaagaagcagc

SEQ ID NO: 67824 - DNA, 21 bp, Homo Sapiens
caaattcgaagaagcagcttc

SEQ ID NO: 67825 - DNA, 17 bp, Homo Sapiens
caacatggctttctcac

SEQ ID NO: 67826 - DNA, 18 bp, Homo Sapiens
caactccaaataaaagta

SEQ ID NO: 67827 - DNA, 25 bp, Homo Sapiens
caacttacacttaggagatttcaac

SEQ ID NO: 67828 - DNA, 17 bp, Homo Sapiens
caagaggtccctggttc

SEQ ID NO: 67829 - DNA, 21 bp, Homo Sapiens
caatccccggcacctccacca

SEQ ID NO: 67830 - DNA, 21 bp, Homo Sapiens
caatccccggcatctccacca

SEQ ID NO: 67831 - DNA, 16 bp, Homo Sapiens
caatggatagcgcatt

SEQ ID NO: 67832 - DNA, 19 bp, Homo Sapiens
caatggatagcgcattgga

SEQ ID NO: 67833 - DNA, 19 bp, Homo Sapiens
cacgcgaaaggtccccggt

SEQ ID NO: 67834 - DNA, 16 bp, Homo Sapiens
cacgcgggagaccggg

SEQ ID NO: 67835 - DNA, 16 bp, Homo Sapiens
cacgcgggaggcccgg

SEQ ID NO: 67836 - DNA, 22 bp, Homo Sapiens
cactctggactctgaatccagc

SEQ ID NO: 67837 - DNA, 18 bp, Homo Sapiens
cactctggactttgaatc

SEQ ID NO: 67838 - DNA, 17 bp, Homo Sapiens
cagaagattccaggttc

SEQ ID NO: 67839 - DNA, 17 bp, Homo Sapiens
cagaagattctaggttc

SEQ ID NO: 67840 - DNA, 17 bp, Homo Sapiens
cagaagattgagggttc

SEQ ID NO: 67841 - DNA, 17 bp, Homo Sapiens
cagaaggctgcgtgttc

SEQ ID NO: 67842 - DNA, 17 bp, Homo Sapiens
cagaaggttgcgtgttc

SEQ ID NO: 67843 - DNA, 20 bp, Homo Sapiens
cagagcccggtaatcgcata

SEQ ID NO: 67844 - DNA, 17 bp, Homo Sapiens
cagaggttccgggttcg

SEQ ID NO: 67845 - DNA, 24 bp, Homo Sapiens
cagagtggcgcagcggaagcgtgc

SEQ ID NO: 67846 - DNA, 25 bp, Homo Sapiens
cagcaacctcggttcgaatccgagt

SEQ ID NO: 67847 - DNA, 22 bp, Homo Sapiens
caggatggccgagcggtctaag

SEQ ID NO: 67848 - DNA, 17 bp, Homo Sapiens
cagggattgtgggttcg

SEQ ID NO: 67849 - DNA, 17 bp, Homo Sapiens
caggggtcgcgagttca

SEQ ID NO: 67850 - DNA, 17 bp, Homo Sapiens
caggttcgactcctggc

SEQ ID NO: 67851 - DNA, 17 bp, Homo Sapiens
caggttcgagtcctgcc

SEQ ID NO: 67852 - DNA, 16 bp, Homo Sapiens
cagtcagtagagcatc

SEQ ID NO: 67853 - DNA, 16 bp, Homo Sapiens
cagtgggtagagcatc

SEQ ID NO: 67854 - DNA, 20 bp, Homo Sapiens
cagtggtagagcatttgact

SEQ ID NO: 67855 - DNA, 17 bp, Homo Sapiens
cataactttgtcaaagt

SEQ ID NO: 67856 - DNA, 16 bp, Homo Sapiens
cataatctgaaggtcc

SEQ ID NO: 67857 - DNA, 18 bp, Homo Sapiens
cataatctgaaggtcctg

SEQ ID NO: 67858 - DNA, 18 bp, Homo Sapiens
cataatctgaaggtcgtg

SEQ ID NO: 67859 - DNA, 21 bp, Homo Sapiens
cataatctgaaggtcgtgagt

SEQ ID NO: 67860 - DNA, 17 bp, Homo Sapiens
catattgaattgcaaat

SEQ ID NO: 67861 - DNA, 19 bp, Homo Sapiens
catgcaagattcccattct

SEQ ID NO: 67862 - DNA, 23 bp, Homo Sapiens
cattaaattatgataatcatatt

SEQ ID NO: 67863 - DNA, 17 bp, Homo Sapiens
cattcttgcgacccggg

SEQ ID NO: 67864 - DNA, 23 bp, Homo Sapiens
cattggggtttccccgcgcaggt

SEQ ID NO: 67865 - DNA, 17 bp, Homo Sapiens
ccaaggtcgcgggttcg

SEQ ID NO: 67866 - DNA, 16 bp, Homo Sapiens
ccagaggtcgatggat

SEQ ID NO: 67867 - DNA, 16 bp, Homo Sapiens
ccaggcggaaacacca

SEQ ID NO: 67868 - DNA, 17 bp, Homo Sapiens
cccagaggtcgatggat

SEQ ID NO: 67869 - DNA, 16 bp, Homo Sapiens
cccagcatctccacca

SEQ ID NO: 67870 - DNA, 18 bp, Homo Sapiens
cccagggtcgtgggttcg

SEQ ID NO: 67871 - DNA, 16 bp, Homo Sapiens
cccagtagagcctcca

SEQ ID NO: 67872 - DNA, 16 bp, Homo Sapiens
cccatctggggtgcca

SEQ ID NO: 67873 - DNA, 16 bp, Homo Sapiens
cccatctgggtcgcca

SEQ ID NO: 67874 - DNA, 16 bp, Homo Sapiens
ccccagtggaaccacc

SEQ ID NO: 67875 - DNA, 20 bp, Homo Sapiens
ccccgggttcaatccccggc

SEQ ID NO: 67876 - DNA, 16 bp, Homo Sapiens
ccccgtccgtgcctcc

SEQ ID NO: 67877 - DNA, 17 bp, Homo Sapiens
ccccgtccgtgcctcca

SEQ ID NO: 67878 - DNA, 22 bp, Homo Sapiens
cccgaaaatgttggttataccc

SEQ ID NO: 67879 - DNA, 20 bp, Homo Sapiens
cccggatagctcagtcggta

SEQ ID NO: 67880 - DNA, 16 bp, Homo Sapiens
cccgtccgtgcctcca

SEQ ID NO: 67881 - DNA, 16 bp, Homo Sapiens
ccgaagatcacgggtt

SEQ ID NO: 67882 - DNA, 17 bp, Homo Sapiens
ccgaagatcacgggttc

SEQ ID NO: 67883 - DNA, 18 bp, Homo Sapiens
ccgaagatcacgggttcg

SEQ ID NO: 67884 - DNA, 16 bp, Homo Sapiens
ccgaagatcgcgggtt

SEQ ID NO: 67885 - DNA, 23 bp, Homo Sapiens
ccggagatgaaaacctttttcca

SEQ ID NO: 67886 - DNA, 18 bp, Homo Sapiens
ccggatcagaagattgag

SEQ ID NO: 67887 - DNA, 19 bp, Homo Sapiens
ccggatcagaagattgagg

SEQ ID NO: 67888 - DNA, 16 bp, Homo Sapiens
ccgggcagaagcacca

SEQ ID NO: 67889 - DNA, 16 bp, Homo Sapiens
ccggtaatcgcataaa

SEQ ID NO: 67890 - DNA, 17 bp, Homo Sapiens
ccggtaatcgcataaaa

SEQ ID NO: 67891 - DNA, 17 bp, Homo Sapiens
ccggttcaaatccgggt

SEQ ID NO: 67892 - DNA, 23 bp, Homo Sapiens
ccggttcgaaaccgggcggaaac

SEQ ID NO: 67893 - DNA, 17 bp, Homo Sapiens
ccgttaacttccaatta

SEQ ID NO: 67894 - DNA, 19 bp, Homo Sapiens
cctaagccagggattgtgg

SEQ ID NO: 67895 - DNA, 16 bp, Homo Sapiens
cctcacacggggcacc

SEQ ID NO: 67896 - DNA, 16 bp, Homo Sapiens
cctcagagggggcacc

SEQ ID NO: 67897 - DNA, 19 bp, Homo Sapiens
cctcctcaaagcaatacac

SEQ ID NO: 67898 - DNA, 16 bp, Homo Sapiens
cctcgtggcgcaatgg

SEQ ID NO: 67899 - DNA, 16 bp, Homo Sapiens
cctgccgcggtcgcca

SEQ ID NO: 67900 - DNA, 16 bp, Homo Sapiens
cctggtggtctagtgg

SEQ ID NO: 67901 - DNA, 21 bp, Homo Sapiens
cctggtggtctagtggttagg

SEQ ID NO: 67902 - DNA, 17 bp, Homo Sapiens
cctgtcacgcgggagac

SEQ ID NO: 67903 - DNA, 18 bp, Homo Sapiens
cctgtcacgcgggagacc

SEQ ID NO: 67904 - DNA, 19 bp, Homo Sapiens
cctgtcacgcgggagaccg

SEQ ID NO: 67905 - DNA, 16 bp, Homo Sapiens
cctttttccaaggaca

SEQ ID NO: 67906 - DNA, 19 bp, Homo Sapiens
cgaaaccgggcggaaacac

SEQ ID NO: 67907 - DNA, 17 bp, Homo Sapiens
cgaaaggttggtggttc

SEQ ID NO: 67908 - DNA, 16 bp, Homo Sapiens
cgaagatcacgggttc

SEQ ID NO: 67909 - DNA, 16 bp, Homo Sapiens
cgaagatcgcgggttc

SEQ ID NO: 67910 - DNA, 21 bp, Homo Sapiens
cgaatcccactcctgacacca

SEQ ID NO: 67911 - DNA, 20 bp, Homo Sapiens
cgaatcccagcggggcctcc

SEQ ID NO: 67912 - DNA, 19 bp, Homo Sapiens
cgaatcccagcggtgcctc

SEQ ID NO: 67913 - DNA, 21 bp, Homo Sapiens
cgaatcccagcggtgcctcca

SEQ ID NO: 67914 - DNA, 20 bp, Homo Sapiens
cgaatcccatcctcgtcgcc

SEQ ID NO: 67915 - DNA, 17 bp, Homo Sapiens
cgaatccgagtcacggc

SEQ ID NO: 67916 - DNA, 20 bp, Homo Sapiens
cgaatccggctcgaaggacc

SEQ ID NO: 67917 - DNA, 16 bp, Homo Sapiens
cgaatgatttcgactc

SEQ ID NO: 67918 - DNA, 18 bp, Homo Sapiens
cgactcccggtgtgggaa

SEQ ID NO: 67919 - DNA, 22 bp, Homo Sapiens
cgagaaagctcacaagaactgc

SEQ ID NO: 67920 - DNA, 17 bp, Homo Sapiens
cgagaggtagcgggatc

SEQ ID NO: 67921 - DNA, 20 bp, Homo Sapiens
cgagccccagtggaaccacc

SEQ ID NO: 67922 - DNA, 21 bp, Homo Sapiens
cgagtcccggcagagatgcca

SEQ ID NO: 67923 - DNA, 21 bp, Homo Sapiens
cgagtcccggcggagtcgcca

SEQ ID NO: 67924 - DNA, 20 bp, Homo Sapiens
cgagtcccttcgtggtcgcc

SEQ ID NO: 67925 - DNA, 20 bp, Homo Sapiens
cgagtctcggtggaacctcc

SEQ ID NO: 67926 - DNA, 20 bp, Homo Sapiens
cgatccccagcatctccacc

SEQ ID NO: 67927 - DNA, 21 bp, Homo Sapiens
cgatccccagcatctccacca

SEQ ID NO: 67928 - DNA, 20 bp, Homo Sapiens
cgatccccggcatctccacc

SEQ ID NO: 67929 - DNA, 18 bp, Homo Sapiens
cgatcccgggtttcggca

SEQ ID NO: 67930 - DNA, 21 bp, Homo Sapiens
cgatcccgggtttcggcacca

SEQ ID NO: 67931 - DNA, 21 bp, Homo Sapiens
cgatgcccgcatcctccacca

SEQ ID NO: 67932 - DNA, 18 bp, Homo Sapiens
cgattcccggccaacgca

SEQ ID NO: 67933 - DNA, 21 bp, Homo Sapiens
cgattcccggccaatgcacca

SEQ ID NO: 67934 - DNA, 18 bp, Homo Sapiens
cgattcccgggcggcgca

SEQ ID NO: 67935 - DNA, 20 bp, Homo Sapiens
cgattcccgggcggcgcacc

SEQ ID NO: 67936 - DNA, 19 bp, Homo Sapiens
cgattcccggtcagggaac

SEQ ID NO: 67937 - DNA, 21 bp, Homo Sapiens
cgattcccggtcagggaacca

SEQ ID NO: 67938 - DNA, 20 bp, Homo Sapiens
cgattccttccttttttgcc

SEQ ID NO: 67939 - DNA, 21 bp, Homo Sapiens
cgattccttccttttttgcca

SEQ ID NO: 67940 - DNA, 17 bp, Homo Sapiens
cgccgcggcccgggttc

SEQ ID NO: 67941 - DNA, 18 bp, Homo Sapiens
cgcgaaaggtccccggtt

SEQ ID NO: 67942 - DNA, 19 bp, Homo Sapiens
cgcgaaaggtccccggttc

SEQ ID NO: 67943 - DNA, 20 bp, Homo Sapiens
cgcgaaaggtccccggttcg

SEQ ID NO: 67944 - DNA, 18 bp, Homo Sapiens
cgcgggaggcccgggttc

SEQ ID NO: 67945 - DNA, 19 bp, Homo Sapiens
cggaagcgtgctgggccca

SEQ ID NO: 67946 - DNA, 25 bp, Homo Sapiens
cggaagcgtgctgggcccataaccc

SEQ ID NO: 67947 - DNA, 16 bp, Homo Sapiens
cggagctggggattgt

SEQ ID NO: 67948 - DNA, 17 bp, Homo Sapiens
cggatagctcagtcggt

SEQ ID NO: 67949 - DNA, 21 bp, Homo Sapiens
cggatagctcagtcggtagag

SEQ ID NO: 67950 - DNA, 19 bp, Homo Sapiens
cggatcagaagattccagg

SEQ ID NO: 67951 - DNA, 18 bp, Homo Sapiens
cggatcagaagattgagg

SEQ ID NO: 67952 - DNA, 20 bp, Homo Sapiens
cggatcagaagattgagggt

SEQ ID NO: 67953 - DNA, 20 bp, Homo Sapiens
cggccgcgtggcctaatgga

SEQ ID NO: 67954 - DNA, 22 bp, Homo Sapiens
cggctagctcagtcggtagagc

SEQ ID NO: 67955 - DNA, 16 bp, Homo Sapiens
cgggaggcccgggttc

SEQ ID NO: 67956 - DNA, 17 bp, Homo Sapiens
cgggtgcgagaggtccc

SEQ ID NO: 67957 - DNA, 17 bp, Homo Sapiens
cgggttcgagtcccggc

SEQ ID NO: 67958 - DNA, 17 bp, Homo Sapiens
cgggttcgattcccggc

SEQ ID NO: 67959 - DNA, 17 bp, Homo Sapiens
cgggttcgattcccggg

SEQ ID NO: 67960 - DNA, 16 bp, Homo Sapiens
cggtaatcgcataaaa

SEQ ID NO: 67961 - DNA, 22 bp, Homo Sapiens
cggtaatcgcataaaacttaaa

SEQ ID NO: 67962 - DNA, 23 bp, Homo Sapiens
cggtaatcgcataaaacttaaaa

SEQ ID NO: 67963 - DNA, 16 bp, Homo Sapiens
cggtagagcatgagac

SEQ ID NO: 67964 - DNA, 17 bp, Homo Sapiens
cggtagagcatgagact

SEQ ID NO: 67965 - DNA, 16 bp, Homo Sapiens
cggtagagcatgggac

SEQ ID NO: 67966 - DNA, 17 bp, Homo Sapiens
cggtagagcatgggact

SEQ ID NO: 67967 - DNA, 25 bp, Homo Sapiens
cggtagagcatgggactcttaatcc

SEQ ID NO: 67968 - DNA, 22 bp, Homo Sapiens
cggttcgaaaccgggcggaaac

SEQ ID NO: 67969 - DNA, 23 bp, Homo Sapiens
cggttcgaatccgagtcacggca

SEQ ID NO: 67970 - DNA, 25 bp, Homo Sapiens
cggttcgaatccgagtcacggcacc

SEQ ID NO: 67971 - DNA, 17 bp, Homo Sapiens
cgtagtgtagtggttat

SEQ ID NO: 67972 - DNA, 18 bp, Homo Sapiens
cgtagtgtagtggttatc

SEQ ID NO: 67973 - DNA, 18 bp, Homo Sapiens
cgtatagtggttagtact

SEQ ID NO: 67974 - DNA, 19 bp, Homo Sapiens
cgtatagtggttagtactc

SEQ ID NO: 67975 - DNA, 19 bp, Homo Sapiens
cgtggccgagcggtctaag

SEQ ID NO: 67976 - DNA, 19 bp, Homo Sapiens
cgtggccgagtggtctaag

SEQ ID NO: 67977 - DNA, 16 bp, Homo Sapiens
cgttaacttccaatta

SEQ ID NO: 67978 - DNA, 16 bp, Homo Sapiens
ctaaggcgctgcgttc

SEQ ID NO: 67979 - DNA, 18 bp, Homo Sapiens
ctaatccagaggttccgg

SEQ ID NO: 67980 - DNA, 17 bp, Homo Sapiens
ctaatggataaggcatc

SEQ ID NO: 67981 - DNA, 20 bp, Homo Sapiens
ctaatggataaggcatcagc

SEQ ID NO: 67982 - DNA, 20 bp, Homo Sapiens
ctaattcaaaggttccgggt

SEQ ID NO: 67983 - DNA, 17 bp, Homo Sapiens
ctagtggttaggattcg

SEQ ID NO: 67984 - DNA, 18 bp, Homo Sapiens
ctagtggttaggattcgg

SEQ ID NO: 67985 - DNA, 20 bp, Homo Sapiens
ctagtggttaggattcggcg

SEQ ID NO: 67986 - DNA, 16 bp, Homo Sapiens
ctcagtggtagagcat

SEQ ID NO: 67987 - DNA, 24 bp, Homo Sapiens
ctcagtggtagagcatttgactgc

SEQ ID NO: 67988 - DNA, 20 bp, Homo Sapiens
ctcagtggtagagcgcatgc

SEQ ID NO: 67989 - DNA, 16 bp, Homo Sapiens
ctcagtggtagagcgt

SEQ ID NO: 67990 - DNA, 20 bp, Homo Sapiens
ctcatgcccccatgtctaac

SEQ ID NO: 67991 - DNA, 17 bp, Homo Sapiens
ctccagatcagaaggct

SEQ ID NO: 67992 - DNA, 18 bp, Homo Sapiens
ctcccggtatgggaacca

SEQ ID NO: 67993 - DNA, 16 bp, Homo Sapiens
ctccttagcgcagtag

SEQ ID NO: 67994 - DNA, 17 bp, Homo Sapiens
ctccttagcgcagtagg

SEQ ID NO: 67995 - DNA, 18 bp, Homo Sapiens
ctctgaatccagcgatcc

SEQ ID NO: 67996 - DNA, 16 bp, Homo Sapiens
ctctggactctgaatc

SEQ ID NO: 67997 - DNA, 17 bp, Homo Sapiens
ctctggactctgaatcc

SEQ ID NO: 67998 - DNA, 17 bp, Homo Sapiens
ctctgtggcgcaatcgg

SEQ ID NO: 67999 - DNA, 20 bp, Homo Sapiens
ctcttaatcccagggtcgtg

SEQ ID NO: 68000 - DNA, 18 bp, Homo Sapiens
ctgaaaatgtttagacgg

SEQ ID NO: 68001 - DNA, 16 bp, Homo Sapiens
ctgaaggtcctgagtt

SEQ ID NO: 68002 - DNA, 18 bp, Homo Sapiens
ctgaatccagcgatccga

SEQ ID NO: 68003 - DNA, 20 bp, Homo Sapiens
ctgaatccagcgatccgagt

SEQ ID NO: 68004 - DNA, 21 bp, Homo Sapiens
ctgacaacagaggcttacgac

SEQ ID NO: 68005 - DNA, 18 bp, Homo Sapiens
ctgacttcggatcagaag

SEQ ID NO: 68006 - DNA, 18 bp, Homo Sapiens
ctgccacgcgggaggccc

SEQ ID NO: 68007 - DNA, 17 bp, Homo Sapiens
ctgtcacgcgggagacc

SEQ ID NO: 68008 - DNA, 20 bp, Homo Sapiens
cttacctcctcaaagcaata

SEQ ID NO: 68009 - DNA, 21 bp, Homo Sapiens
cttacctcctcaaagcaatac

SEQ ID NO: 68010 - DNA, 16 bp, Homo Sapiens
cttagcattaaccttt

SEQ ID NO: 68011 - DNA, 21 bp, Homo Sapiens
cttagcattaaccttttaagt

SEQ ID NO: 68012 - DNA, 16 bp, Homo Sapiens
cttaggtcgctggttc

SEQ ID NO: 68013 - DNA, 18 bp, Homo Sapiens
cttccaagcagttgaccc

SEQ ID NO: 68014 - DNA, 18 bp, Homo Sapiens
cttcggatcagaagattg

SEQ ID NO: 68015 - DNA, 20 bp, Homo Sapiens
cttcggatcagaagattgag

SEQ ID NO: 68016 - DNA, 21 bp, Homo Sapiens
cttcggatcagaagattgagg

SEQ ID NO: 68017 - DNA, 19 bp, Homo Sapiens
cttcggatcagaagattgc

SEQ ID NO: 68018 - DNA, 18 bp, Homo Sapiens
cttcgggggcgtgggttc

SEQ ID NO: 68019 - DNA, 16 bp, Homo Sapiens
cttgcgacccgggttc

SEQ ID NO: 68020 - DNA, 23 bp, Homo Sapiens
gaaaaagtcatggaggccatggg

SEQ ID NO: 68021 - DNA, 20 bp, Homo Sapiens
gaaaccatcctctgctacca

SEQ ID NO: 68022 - DNA, 19 bp, Homo Sapiens
gaaaccgggcggaaacacc

SEQ ID NO: 68023 - DNA, 17 bp, Homo Sapiens
gaaaggttggtggttcg

SEQ ID NO: 68024 - DNA, 18 bp, Homo Sapiens
gaaccaacacctctttac

SEQ ID NO: 68025 - DNA, 16 bp, Homo Sapiens
gaagatcacgggttcg

SEQ ID NO: 68026 - DNA, 16 bp, Homo Sapiens
gaagatcgcgggttcg

SEQ ID NO: 68027 - DNA, 17 bp, Homo Sapiens
gaagcgtgctgggccca

SEQ ID NO: 68028 - DNA, 16 bp, Homo Sapiens
gaaggtcgtgagttcg

SEQ ID NO: 68029 - DNA, 20 bp, Homo Sapiens
gaatcacgtcggggtcacca

SEQ ID NO: 68030 - DNA, 19 bp, Homo Sapiens
gaatcccaccgctgccacc

SEQ ID NO: 68031 - DNA, 20 bp, Homo Sapiens
gaatcccacttctgacacca

SEQ ID NO: 68032 - DNA, 20 bp, Homo Sapiens
gaatcccagcggtgcctcca

SEQ ID NO: 68033 - DNA, 19 bp, Homo Sapiens
gaatcccatcctcgtcgcc

SEQ ID NO: 68034 - DNA, 18 bp, Homo Sapiens
gaatccgagtcacggcac

SEQ ID NO: 68035 - DNA, 19 bp, Homo Sapiens
gaatcctgccgactacgcc

SEQ ID NO: 68036 - DNA, 20 bp, Homo Sapiens
gaatcctgccgactacgcca

SEQ ID NO: 68037 - DNA, 23 bp, Homo Sapiens
gaatctgacaacagaggcttacg

SEQ ID NO: 68038 - DNA, 25 bp, Homo Sapiens
gaatctgacaacagaggcttacgac

SEQ ID NO: 68039 - DNA, 17 bp, Homo Sapiens
gacgaggtggccgagtg

SEQ ID NO: 68040 - DNA, 20 bp, Homo Sapiens
gacgaggtggccgagtggtt

SEQ ID NO: 68041 - DNA, 22 bp, Homo Sapiens
gacgaggtggccgagtggttaa

SEQ ID NO: 68042 - DNA, 24 bp, Homo Sapiens
gacgaggtggccgagtggttaagg

SEQ ID NO: 68043 - DNA, 18 bp, Homo Sapiens
gactcccggtatgggaac

SEQ ID NO: 68044 - DNA, 20 bp, Homo Sapiens
gactcccggtatgggaacca

SEQ ID NO: 68045 - DNA, 19 bp, Homo Sapiens
gactcctggctggctcgcc

SEQ ID NO: 68046 - DNA, 17 bp, Homo Sapiens
gacttcggatcagaaga

SEQ ID NO: 68047 - DNA, 23 bp, Homo Sapiens
gagaccggggttcaattccccga

SEQ ID NO: 68048 - DNA, 16 bp, Homo Sapiens
gagaggtagcgggatc

SEQ ID NO: 68049 - DNA, 17 bp, Homo Sapiens
gagaggtagcgggatcg

SEQ ID NO: 68050 - DNA, 19 bp, Homo Sapiens
gagcccacccagggacgcc

SEQ ID NO: 68051 - DNA, 16 bp, Homo Sapiens
gagggttcgagtccct

SEQ ID NO: 68052 - DNA, 20 bp, Homo Sapiens
gagtcccggcagagatgcca

SEQ ID NO: 68053 - DNA, 20 bp, Homo Sapiens
gagtcccggcggagtcgcca

SEQ ID NO: 68054 - DNA, 19 bp, Homo Sapiens
gagtctcggtggaacctcc

SEQ ID NO: 68055 - DNA, 23 bp, Homo Sapiens
gagttcgaacctcagagggggca

SEQ ID NO: 68056 - DNA, 17 bp, Homo Sapiens
gataacagctatccatt

SEQ ID NO: 68057 - DNA, 19 bp, Homo Sapiens
gatccccggcatctccacc

SEQ ID NO: 68058 - DNA, 20 bp, Homo Sapiens
gatcccgggcggaaacacca

SEQ ID NO: 68059 - DNA, 20 bp, Homo Sapiens
gatcccgggtttcggcacca

SEQ ID NO: 68060 - DNA, 19 bp, Homo Sapiens
gatgtagctcagtggtaga

SEQ ID NO: 68061 - DNA, 22 bp, Homo Sapiens
gattccaggttcgactcctggc

SEQ ID NO: 68062 - DNA, 19 bp, Homo Sapiens
gattccccgacggggagcc

SEQ ID NO: 68063 - DNA, 20 bp, Homo Sapiens
gattccccgacggggagcca

SEQ ID NO: 68064 - DNA, 19 bp, Homo Sapiens
gattcccggccaatgcacc

SEQ ID NO: 68065 - DNA, 20 bp, Homo Sapiens
gattcccggccaatgcacca

SEQ ID NO: 68066 - DNA, 19 bp, Homo Sapiens
gattcccggtcagggaacc

SEQ ID NO: 68067 - DNA, 16 bp, Homo Sapiens
gattccggatcagaag

SEQ ID NO: 68068 - DNA, 20 bp, Homo Sapiens
gattccggatcagaagattg

SEQ ID NO: 68069 - DNA, 20 bp, Homo Sapiens
gattcggcgctctcaccgcc

SEQ ID NO: 68070 - DNA, 22 bp, Homo Sapiens
gattctaggttcgactcctggc

SEQ ID NO: 68071 - DNA, 19 bp, Homo Sapiens
gattgagggttcgaatccc

SEQ ID NO: 68072 - DNA, 20 bp, Homo Sapiens
gattgagggttcgaatccct

SEQ ID NO: 68073 - DNA, 22 bp, Homo Sapiens
gattgagggttcgaatcccttc

SEQ ID NO: 68074 - DNA, 17 bp, Homo Sapiens
gattgagggttcgagtc

SEQ ID NO: 68075 - DNA, 18 bp, Homo Sapiens
gattgagggttcgagtcc

SEQ ID NO: 68076 - DNA, 22 bp, Homo Sapiens
gattgcaggttcgagtcctgcc

SEQ ID NO: 68077 - DNA, 24 bp, Homo Sapiens
gattgtgaatctgacaacagaggc

SEQ ID NO: 68078 - DNA, 19 bp, Homo Sapiens
gattgtgggttcgagtccc

SEQ ID NO: 68079 - DNA, 20 bp, Homo Sapiens
gattgtgggttcgagtccca

SEQ ID NO: 68080 - DNA, 22 bp, Homo Sapiens
gattgtgggttcgagtcccatc

SEQ ID NO: 68081 - DNA, 19 bp, Homo Sapiens
gatttcaacttaacttgac

SEQ ID NO: 68082 - DNA, 20 bp, Homo Sapiens
gcatgagactcttaatctca

SEQ ID NO: 68083 - DNA, 19 bp, Homo Sapiens
gcatgggtggttcagtggt

SEQ ID NO: 68084 - DNA, 20 bp, Homo Sapiens
gcatgggtggttcagtggta

SEQ ID NO: 68085 - DNA, 22 bp, Homo Sapiens
gcatgggtggttcagtggtaga

SEQ ID NO: 68086 - DNA, 17 bp, Homo Sapiens
gccaaggtcgcgggttc

SEQ ID NO: 68087 - DNA, 19 bp, Homo Sapiens
gccagggattgtgggttcg

SEQ ID NO: 68088 - DNA, 16 bp, Homo Sapiens
gcccacccagggacgc

SEQ ID NO: 68089 - DNA, 17 bp, Homo Sapiens
gccccagtggaaccacc

SEQ ID NO: 68090 - DNA, 16 bp, Homo Sapiens
gcccccatgtctaaca

SEQ ID NO: 68091 - DNA, 24 bp, Homo Sapiens
gcccggatagctcagtcggtagag

SEQ ID NO: 68092 - DNA, 21 bp, Homo Sapiens
gcccggctagctcagtcggta

SEQ ID NO: 68093 - DNA, 16 bp, Homo Sapiens
gccctcagtaagttgc

SEQ ID NO: 68094 - DNA, 18 bp, Homo Sapiens
gccgaggttgtgagttcg

SEQ ID NO: 68095 - DNA, 18 bp, Homo Sapiens
gcctcacctggagcacca

SEQ ID NO: 68096 - DNA, 17 bp, Homo Sapiens
gcctctttttaccacca

SEQ ID NO: 68097 - DNA, 18 bp, Homo Sapiens
gcctgtcacgcgggagac

SEQ ID NO: 68098 - DNA, 23 bp, Homo Sapiens
gcgatccgagttcaaatctcggt

SEQ ID NO: 68099 - DNA, 23 bp, Homo Sapiens
gcgtgctgggcccataacccaga

SEQ ID NO: 68100 - DNA, 20 bp, Homo Sapiens
gcgtggccgagtggtctaag

SEQ ID NO: 68101 - DNA, 20 bp, Homo Sapiens
gcgttggtggtatagtggta

SEQ ID NO: 68102 - DNA, 19 bp, Homo Sapiens
gctaaataagctatcgggc

SEQ ID NO: 68103 - DNA, 16 bp, Homo Sapiens
gctagctcagtcggta

SEQ ID NO: 68104 - DNA, 20 bp, Homo Sapiens
gctgagtgaagcattggact

SEQ ID NO: 68105 - DNA, 16 bp, Homo Sapiens
gctgtgatggccgagt

SEQ ID NO: 68106 - DNA, 18 bp, Homo Sapiens
gcttctgtagtgtagtgg

SEQ ID NO: 68107 - DNA, 18 bp, Homo Sapiens
ggaagcgtgctgggccca

SEQ ID NO: 68108 - DNA, 16 bp, Homo Sapiens
ggactctgaatccagc

SEQ ID NO: 68109 - DNA, 18 bp, Homo Sapiens
ggactctgaatccagcga

SEQ ID NO: 68110 - DNA, 17 bp, Homo Sapiens
ggagctggggattgtgg

SEQ ID NO: 68111 - DNA, 17 bp, Homo Sapiens
ggatagctcagtcggta

SEQ ID NO: 68112 - DNA, 18 bp, Homo Sapiens
ggatcagaagattccagg

SEQ ID NO: 68113 - DNA, 17 bp, Homo Sapiens
ggatcagaagattgagg

SEQ ID NO: 68114 - DNA, 20 bp, Homo Sapiens
ggattgtgggttcgagtccc

SEQ ID NO: 68115 - DNA, 22 bp, Homo Sapiens
ggccgcagcaacctcggttcga

SEQ ID NO: 68116 - DNA, 18 bp, Homo Sapiens
ggccgcgtggcctaatgg

SEQ ID NO: 68117 - DNA, 20 bp, Homo Sapiens
ggctagctcagtcggtagag

SEQ ID NO: 68118 - DNA, 21 bp, Homo Sapiens
ggctagctcagtcggtagagc

SEQ ID NO: 68119 - DNA, 25 bp, Homo Sapiens
ggctagctcagtcggtagagcatgg

SEQ ID NO: 68120 - DNA, 21 bp, Homo Sapiens
ggctccagtctcttcgggggc

SEQ ID NO: 68121 - DNA, 16 bp, Homo Sapiens
ggctccatagctcagg

SEQ ID NO: 68122 - DNA, 19 bp, Homo Sapiens
gggattgtgggttcgagtc

SEQ ID NO: 68123 - DNA, 24 bp, Homo Sapiens
gggattgtgggttcgagtcccatc

SEQ ID NO: 68124 - DNA, 21 bp, Homo Sapiens
ggggattgtgggttcgagtcc

SEQ ID NO: 68125 - DNA, 25 bp, Homo Sapiens
ggggattgtgggttcgagtcccatc

SEQ ID NO: 68126 - DNA, 17 bp, Homo Sapiens
gggggattagctcaaat

SEQ ID NO: 68127 - DNA, 23 bp, Homo Sapiens
gggggattagctcaaatggtaga

SEQ ID NO: 68128 - DNA, 17 bp, Homo Sapiens
gggggtatagctcagtg

SEQ ID NO: 68129 - DNA, 21 bp, Homo Sapiens
ggggttttgcagtccttacca

SEQ ID NO: 68130 - DNA, 20 bp, Homo Sapiens
gggtcgtgggttcgagcccc

SEQ ID NO: 68131 - DNA, 24 bp, Homo Sapiens
gggtcgtgggttcgagccccacgt

SEQ ID NO: 68132 - DNA, 17 bp, Homo Sapiens
gggtgtgataggtggca

SEQ ID NO: 68133 - DNA, 20 bp, Homo Sapiens
gggttcgattcccgggcggc

SEQ ID NO: 68134 - DNA, 19 bp, Homo Sapiens
gggtttccccgcgcaggtt

SEQ ID NO: 68135 - DNA, 16 bp, Homo Sapiens
ggtagaattctcgcct

SEQ ID NO: 68136 - DNA, 16 bp, Homo Sapiens
ggtagagcatgggact

SEQ ID NO: 68137 - DNA, 18 bp, Homo Sapiens
ggtagagcatttgactgc

SEQ ID NO: 68138 - DNA, 23 bp, Homo Sapiens
ggtagcgtggccgagcggtctaa

SEQ ID NO: 68139 - DNA, 24 bp, Homo Sapiens
ggtagcgtggccgagcggtctaag

SEQ ID NO: 68140 - DNA, 17 bp, Homo Sapiens
ggtagcgtggccgagtg

SEQ ID NO: 68141 - DNA, 22 bp, Homo Sapiens
ggtagcgtggccgagtggtcta

SEQ ID NO: 68142 - DNA, 24 bp, Homo Sapiens
ggtagcgtggccgagtggtctaag

SEQ ID NO: 68143 - DNA, 16 bp, Homo Sapiens
ggtatgattctcgctt

SEQ ID NO: 68144 - DNA, 16 bp, Homo Sapiens
ggtcgatggatcgaaa

SEQ ID NO: 68145 - DNA, 17 bp, Homo Sapiens
ggtcgatggatcgaaac

SEQ ID NO: 68146 - DNA, 19 bp, Homo Sapiens
ggtcgcgggttcgatcccc

SEQ ID NO: 68147 - DNA, 22 bp, Homo Sapiens
ggtcgcgggttcgatccccgta

SEQ ID NO: 68148 - DNA, 17 bp, Homo Sapiens
ggtgagcactctggact

SEQ ID NO: 68149 - DNA, 18 bp, Homo Sapiens
ggtgattttcatattgaa

SEQ ID NO: 68150 - DNA, 19 bp, Homo Sapiens
ggtgattttcatattgaat

SEQ ID NO: 68151 - DNA, 17 bp, Homo Sapiens
ggtgcgagaggtcccgg

SEQ ID NO: 68152 - DNA, 25 bp, Homo Sapiens
ggtggtctagtggttaggattcggc

SEQ ID NO: 68153 - DNA, 20 bp, Homo Sapiens
ggtggttcagtggtagaatt

SEQ ID NO: 68154 - DNA, 18 bp, Homo Sapiens
ggttcaaatcccggacga

SEQ ID NO: 68155 - DNA, 19 bp, Homo Sapiens
ggttcagtggtagaattct

SEQ ID NO: 68156 - DNA, 16 bp, Homo Sapiens
ggttccatagtgtagc

SEQ ID NO: 68157 - DNA, 17 bp, Homo Sapiens
ggttccatggtgtaatg

SEQ ID NO: 68158 - DNA, 16 bp, Homo Sapiens
ggttcgattcccgggc

SEQ ID NO: 68159 - DNA, 19 bp, Homo Sapiens
ggttcgattcccggtcagg

SEQ ID NO: 68160 - DNA, 17 bp, Homo Sapiens
ggttgtagtccgtgcga

SEQ ID NO: 68161 - DNA, 23 bp, Homo Sapiens
ggttgtagtccgtgcgagaatac

SEQ ID NO: 68162 - DNA, 17 bp, Homo Sapiens
ggtttccccgcgcaggt

SEQ ID NO: 68163 - DNA, 18 bp, Homo Sapiens
ggttttgcagtccttacc

SEQ ID NO: 68164 - DNA, 17 bp, Homo Sapiens
gtaaaccggagatgaaa

SEQ ID NO: 68165 - DNA, 17 bp, Homo Sapiens
gtagagcatgagactct

SEQ ID NO: 68166 - DNA, 16 bp, Homo Sapiens
gtagagcatgggactc

SEQ ID NO: 68167 - DNA, 17 bp, Homo Sapiens
gtagtgtagcggttatc

SEQ ID NO: 68168 - DNA, 19 bp, Homo Sapiens
gtagtgtagcggttatcac

SEQ ID NO: 68169 - DNA, 17 bp, Homo Sapiens
gtatgattctcgctttg

SEQ ID NO: 68170 - DNA, 18 bp, Homo Sapiens
gtatgattctcgctttgg

SEQ ID NO: 68171 - DNA, 16 bp, Homo Sapiens
gtcacggtggccgagt

SEQ ID NO: 68172 - DNA, 19 bp, Homo Sapiens
gtcacggtggccgagtggt

SEQ ID NO: 68173 - DNA, 17 bp, Homo Sapiens
gtcaggatggccgagcg

SEQ ID NO: 68174 - DNA, 24 bp, Homo Sapiens
gtcaggatggccgagcggtctaag

SEQ ID NO: 68175 - DNA, 17 bp, Homo Sapiens
gtcaggatggccgagtg

SEQ ID NO: 68176 - DNA, 18 bp, Homo Sapiens
gtcccacccggggtacca

SEQ ID NO: 68177 - DNA, 18 bp, Homo Sapiens
gtcccacctggggtacca

SEQ ID NO: 68178 - DNA, 17 bp, Homo Sapiens
gtcccggcagagatgcc

SEQ ID NO: 68179 - DNA, 17 bp, Homo Sapiens
gtcccggcggagtcgcc

SEQ ID NO: 68180 - DNA, 22 bp, Homo Sapiens
gtcccgggttcaaatcccggac

SEQ ID NO: 68181 - DNA, 18 bp, Homo Sapiens
gtccctgtccaggcgcca

SEQ ID NO: 68182 - DNA, 18 bp, Homo Sapiens
gtcccttcgtggtcgcca

SEQ ID NO: 68183 - DNA, 17 bp, Homo Sapiens
gtcctgggttcgagccc

SEQ ID NO: 68184 - DNA, 16 bp, Homo Sapiens
gtccttgtagtataaa

SEQ ID NO: 68185 - DNA, 16 bp, Homo Sapiens
gtcgatggatcgaaac

SEQ ID NO: 68186 - DNA, 20 bp, Homo Sapiens
gtcgcgagttcaaatctcgc

SEQ ID NO: 68187 - DNA, 17 bp, Homo Sapiens
gtcgcgggttcgatccc

SEQ ID NO: 68188 - DNA, 18 bp, Homo Sapiens
gtcgcgggttcgatcccc

SEQ ID NO: 68189 - DNA, 21 bp, Homo Sapiens
gtcgcgggttcgatccccgta

SEQ ID NO: 68190 - DNA, 19 bp, Homo Sapiens
gtcgctggttcgattccgg

SEQ ID NO: 68191 - DNA, 20 bp, Homo Sapiens
gtcgctggttcgattccggc

SEQ ID NO: 68192 - DNA, 19 bp, Homo Sapiens
gtcggtagagcatcagact

SEQ ID NO: 68193 - DNA, 17 bp, Homo Sapiens
gtcgtgagttcgatcct

SEQ ID NO: 68194 - DNA, 18 bp, Homo Sapiens
gtcgtgagttcgatcctc

SEQ ID NO: 68195 - DNA, 21 bp, Homo Sapiens
gtcgtgggttcgagccccacg

SEQ ID NO: 68196 - DNA, 19 bp, Homo Sapiens
gtctagtggttaggattcg

SEQ ID NO: 68197 - DNA, 24 bp, Homo Sapiens
gtctctgtggcgcaatggacgagc

SEQ ID NO: 68198 - DNA, 17 bp, Homo Sapiens
gtgaatctgacaacaga

SEQ ID NO: 68199 - DNA, 17 bp, Homo Sapiens
gtgattttcatattgaa

SEQ ID NO: 68200 - DNA, 18 bp, Homo Sapiens
gtgattttcatattgaat

SEQ ID NO: 68201 - DNA, 16 bp, Homo Sapiens
gtggccgagcggtcta

SEQ ID NO: 68202 - DNA, 18 bp, Homo Sapiens
gtggccgagcggtctaag

SEQ ID NO: 68203 - DNA, 18 bp, Homo Sapiens
gtggcgcaatggacgagc

SEQ ID NO: 68204 - DNA, 17 bp, Homo Sapiens
gtggctgatttgcgttc

SEQ ID NO: 68205 - DNA, 19 bp, Homo Sapiens
gtggctgatttgcgttcag

SEQ ID NO: 68206 - DNA, 16 bp, Homo Sapiens
gtggggttttgcagtc

SEQ ID NO: 68207 - DNA, 17 bp, Homo Sapiens
gtggggttttgcagtcc

SEQ ID NO: 68208 - DNA, 18 bp, Homo Sapiens
gtgggttcgagtcccatc

SEQ ID NO: 68209 - DNA, 16 bp, Homo Sapiens
gtggtagagcatttga

SEQ ID NO: 68210 - DNA, 18 bp, Homo Sapiens
gtggtagagcatttgact

SEQ ID NO: 68211 - DNA, 19 bp, Homo Sapiens
gtggtagagcatttgactg

SEQ ID NO: 68212 - DNA, 23 bp, Homo Sapiens
gtggttaggattcggcgctctca

SEQ ID NO: 68213 - DNA, 18 bp, Homo Sapiens
gtggttcagtggtagaat

SEQ ID NO: 68214 - DNA, 19 bp, Homo Sapiens
gtggttcagtggtagaatt

SEQ ID NO: 68215 - DNA, 19 bp, Homo Sapiens
gttagcactctggactttg

SEQ ID NO: 68216 - DNA, 16 bp, Homo Sapiens
gttagtactctgcgtt

SEQ ID NO: 68217 - DNA, 16 bp, Homo Sapiens
gttcaaatcccggacg

SEQ ID NO: 68218 - DNA, 23 bp, Homo Sapiens
gttcaaatcccggacgagccccc

SEQ ID NO: 68219 - DNA, 18 bp, Homo Sapiens
gttcagtggtagaattct

SEQ ID NO: 68220 - DNA, 19 bp, Homo Sapiens
gttcagtggtagaattctc

SEQ ID NO: 68221 - DNA, 17 bp, Homo Sapiens
gttccgggttcgagtcc

SEQ ID NO: 68222 - DNA, 24 bp, Homo Sapiens
gttcgaaaccgggcggaaacacca

SEQ ID NO: 68223 - DNA, 21 bp, Homo Sapiens
gttcgaatccgagtcacggca

SEQ ID NO: 68224 - DNA, 21 bp, Homo Sapiens
gttcgagtcccttcgtggtcg

SEQ ID NO: 68225 - DNA, 23 bp, Homo Sapiens
gttcgatcccgggtttcggcacc

SEQ ID NO: 68226 - DNA, 22 bp, Homo Sapiens
gttcgattccccgacggggagc

SEQ ID NO: 68227 - DNA, 23 bp, Homo Sapiens
gttcgattccccgacggggagcc

SEQ ID NO: 68228 - DNA, 24 bp, Homo Sapiens
gttcgattccccgacggggagcca

SEQ ID NO: 68229 - DNA, 22 bp, Homo Sapiens
gttcgattcccggtcagggaac

SEQ ID NO: 68230 - DNA, 23 bp, Homo Sapiens
gttcgattcccggtcagggaacc

SEQ ID NO: 68231 - DNA, 24 bp, Homo Sapiens
gttcgattcccggtcagggaacca

SEQ ID NO: 68232 - DNA, 23 bp, Homo Sapiens
gttcttgtagttgaaatacaacg

SEQ ID NO: 68233 - DNA, 16 bp, Homo Sapiens
gttgtagtccgtgcga

SEQ ID NO: 68234 - DNA, 17 bp, Homo Sapiens
gttgtagtccgtgcgag

SEQ ID NO: 68235 - DNA, 23 bp, Homo Sapiens
gtttatgtagcttacctcctcaa

SEQ ID NO: 68236 - DNA, 21 bp, Homo Sapiens
gtttccgtagtgtagtggtca

SEQ ID NO: 68237 - DNA, 25 bp, Homo Sapiens
gtttccgtagtgtagtggttatcac

SEQ ID NO: 68238 - DNA, 17 bp, Homo Sapiens
gttttgcagtccttacc

SEQ ID NO: 68239 - DNA, 20 bp, Homo Sapiens
taaagtggctgatttgcgtt

SEQ ID NO: 68240 - DNA, 21 bp, Homo Sapiens
taaagtggctgatttgcgttc

SEQ ID NO: 68241 - DNA, 20 bp, Homo Sapiens
taaatcctatatatcttacc

SEQ ID NO: 68242 - DNA, 23 bp, Homo Sapiens
taaattataggctaaatcctata

SEQ ID NO: 68243 - DNA, 21 bp, Homo Sapiens
taaccaaaacatcagattgtg

SEQ ID NO: 68244 - DNA, 22 bp, Homo Sapiens
taaccaaaacatcagattgtga

SEQ ID NO: 68245 - DNA, 21 bp, Homo Sapiens
taacccagaggtcgatggatc

SEQ ID NO: 68246 - DNA, 18 bp, Homo Sapiens
taactcatgcccccatgt

SEQ ID NO: 68247 - DNA, 16 bp, Homo Sapiens
taagccagggattgtg

SEQ ID NO: 68248 - DNA, 18 bp, Homo Sapiens
taagccagggattgtggg

SEQ ID NO: 68249 - DNA, 21 bp, Homo Sapiens
taagctatcgggcccataccc

SEQ ID NO: 68250 - DNA, 21 bp, Homo Sapiens
taagtcccattggtctagcca

SEQ ID NO: 68251 - DNA, 17 bp, Homo Sapiens
taatccagaggttccgg

SEQ ID NO: 68252 - DNA, 19 bp, Homo Sapiens
taatctgaaggtcctgagt

SEQ ID NO: 68253 - DNA, 19 bp, Homo Sapiens
taatctgaaggtcgtgagt

SEQ ID NO: 68254 - DNA, 23 bp, Homo Sapiens
taatctgaaggtcgtgagttcga

SEQ ID NO: 68255 - DNA, 22 bp, Homo Sapiens
taatgccgaggttgtgagttcg

SEQ ID NO: 68256 - DNA, 19 bp, Homo Sapiens
taatggataaggcatcagc

SEQ ID NO: 68257 - DNA, 23 bp, Homo Sapiens
taatggataaggcatcagcctcc

SEQ ID NO: 68258 - DNA, 16 bp, Homo Sapiens
taatggataaggcatt

SEQ ID NO: 68259 - DNA, 16 bp, Homo Sapiens
taatggataaggcgtc

SEQ ID NO: 68260 - DNA, 22 bp, Homo Sapiens
taatggtggagttaaagacttt

SEQ ID NO: 68261 - DNA, 18 bp, Homo Sapiens
taatggttagcactctgg

SEQ ID NO: 68262 - DNA, 17 bp, Homo Sapiens
tacaacgatggtttttc

SEQ ID NO: 68263 - DNA, 20 bp, Homo Sapiens
tacaacgatggtttttcata

SEQ ID NO: 68264 - DNA, 21 bp, Homo Sapiens
tacaacgatggtttttcatat

SEQ ID NO: 68265 - DNA, 22 bp, Homo Sapiens
tacaacgatggtttttcatatc

SEQ ID NO: 68266 - DNA, 22 bp, Homo Sapiens
tactctgcgttgtggccgcagc

SEQ ID NO: 68267 - DNA, 16 bp, Homo Sapiens
tagaattctcgcctgc

SEQ ID NO: 68268 - DNA, 16 bp, Homo Sapiens
tagagcatgagactct

SEQ ID NO: 68269 - DNA, 18 bp, Homo Sapiens
tagagcatgagactctta

SEQ ID NO: 68270 - DNA, 23 bp, Homo Sapiens
tagagcatgagactcttaatctc

SEQ ID NO: 68271 - DNA, 16 bp, Homo Sapiens
tagagcatgggactct

SEQ ID NO: 68272 - DNA, 17 bp, Homo Sapiens
tagcactctggactctg

SEQ ID NO: 68273 - DNA, 18 bp, Homo Sapiens
tagcactctggactctga

SEQ ID NO: 68274 - DNA, 19 bp, Homo Sapiens
taggcctctttttaccacc

SEQ ID NO: 68275 - DNA, 17 bp, Homo Sapiens
taggggtatgattctcg

SEQ ID NO: 68276 - DNA, 23 bp, Homo Sapiens
taggtcgctggttcgattccggc

SEQ ID NO: 68277 - DNA, 24 bp, Homo Sapiens
taggtcgctggttcgattccggct

SEQ ID NO: 68278 - DNA, 25 bp, Homo Sapiens
tagtaccgttaacttccaattaact

SEQ ID NO: 68279 - DNA, 17 bp, Homo Sapiens
tagtactctgcgttgtg

SEQ ID NO: 68280 - DNA, 17 bp, Homo Sapiens
tagtcgtggccgagtgg

SEQ ID NO: 68281 - DNA, 18 bp, Homo Sapiens
tagtggctaggattcggc

SEQ ID NO: 68282 - DNA, 19 bp, Homo Sapiens
tagtggtgagcatagctgc

SEQ ID NO: 68283 - DNA, 19 bp, Homo Sapiens
tagtggttaggattcggcg

SEQ ID NO: 68284 - DNA, 16 bp, Homo Sapiens
tagtggttagtactct

SEQ ID NO: 68285 - DNA, 17 bp, Homo Sapiens
tagtggttagtactctg

SEQ ID NO: 68286 - DNA, 21 bp, Homo Sapiens
tagtggttagtactctgcgtt

SEQ ID NO: 68287 - DNA, 19 bp, Homo Sapiens
tagtggttagtatccccgc

SEQ ID NO: 68288 - DNA, 16 bp, Homo Sapiens
tagtgtagtggttatc

SEQ ID NO: 68289 - DNA, 19 bp, Homo Sapiens
tatagctcagtggtagagc

SEQ ID NO: 68290 - DNA, 18 bp, Homo Sapiens
tatagtggttagtactct

SEQ ID NO: 68291 - DNA, 18 bp, Homo Sapiens
tatccattggtcttaggc

SEQ ID NO: 68292 - DNA, 16 bp, Homo Sapiens
tatgtagcttacctcc

SEQ ID NO: 68293 - DNA, 19 bp, Homo Sapiens
tattgaattgcaaattcga

SEQ ID NO: 68294 - DNA, 21 bp, Homo Sapiens
tcaaaaccaggcggaaacacc

SEQ ID NO: 68295 - DNA, 22 bp, Homo Sapiens
tcaaaaccaggcggaaacacca

SEQ ID NO: 68296 - DNA, 19 bp, Homo Sapiens
tcaaagttaaattataggc

SEQ ID NO: 68297 - DNA, 20 bp, Homo Sapiens
tcaaatcccggacgagcccc

SEQ ID NO: 68298 - DNA, 20 bp, Homo Sapiens
tcaaatctcggtggaacctc

SEQ ID NO: 68299 - DNA, 21 bp, Homo Sapiens
tcaaatctcggtgggacctcc

SEQ ID NO: 68300 - DNA, 20 bp, Homo Sapiens
tcaccgccgcggcccgggtt

SEQ ID NO: 68301 - DNA, 18 bp, Homo Sapiens
tcagaaggctgcgtgttc

SEQ ID NO: 68302 - DNA, 18 bp, Homo Sapiens
tcagaaggttgcgtgttc

SEQ ID NO: 68303 - DNA, 17 bp, Homo Sapiens
tcagtcggtagagcatg

SEQ ID NO: 68304 - DNA, 18 bp, Homo Sapiens
tcatattgaattgcaaat

SEQ ID NO: 68305 - DNA, 16 bp, Homo Sapiens
tccaaataaaagtacc

SEQ ID NO: 68306 - DNA, 18 bp, Homo Sapiens
tccagaggttccgggttc

SEQ ID NO: 68307 - DNA, 18 bp, Homo Sapiens
tccagcgatccgagttca

SEQ ID NO: 68308 - DNA, 21 bp, Homo Sapiens
tccattggggtttccccgcgc

SEQ ID NO: 68309 - DNA, 19 bp, Homo Sapiens
tccattggtcttaggcccc

SEQ ID NO: 68310 - DNA, 17 bp, Homo Sapiens
tcccaccagagtcgcca

SEQ ID NO: 68311 - DNA, 17 bp, Homo Sapiens
tcccacccggggtacca

SEQ ID NO: 68312 - DNA, 17 bp, Homo Sapiens
tcccagtagagcctcca

SEQ ID NO: 68313 - DNA, 20 bp, Homo Sapiens
tcccatatggtctagcggtt

SEQ ID NO: 68314 - DNA, 17 bp, Homo Sapiens
tcccatctggggtgcca

SEQ ID NO: 68315 - DNA, 17 bp, Homo Sapiens
tcccatctgggtcgcca

SEQ ID NO: 68316 - DNA, 16 bp, Homo Sapiens
tcccattggtctagcc

SEQ ID NO: 68317 - DNA, 18 bp, Homo Sapiens
tccccagcacctccacca

SEQ ID NO: 68318 - DNA, 17 bp, Homo Sapiens
tccccagcatctccacc

SEQ ID NO: 68319 - DNA, 17 bp, Homo Sapiens
tccccgacggggagcca

SEQ ID NO: 68320 - DNA, 16 bp, Homo Sapiens
tccccggcacctccac

SEQ ID NO: 68321 - DNA, 16 bp, Homo Sapiens
tccccggcatctccac

SEQ ID NO: 68322 - DNA, 17 bp, Homo Sapiens
tcccggcccatgcacca

SEQ ID NO: 68323 - DNA, 16 bp, Homo Sapiens
tcccgggttcaaatcc

SEQ ID NO: 68324 - DNA, 16 bp, Homo Sapiens
tcccggtcagggaacc

SEQ ID NO: 68325 - DNA, 20 bp, Homo Sapiens
tccctggtggtctagtggct

SEQ ID NO: 68326 - DNA, 21 bp, Homo Sapiens
tccctggtggtctagtggtta

SEQ ID NO: 68327 - DNA, 17 bp, Homo Sapiens
tcccttcgtggttgcca

SEQ ID NO: 68328 - DNA, 18 bp, Homo Sapiens
tccggatcagaagattga

SEQ ID NO: 68329 - DNA, 20 bp, Homo Sapiens
tccggatcagaagattgagg

SEQ ID NO: 68330 - DNA, 18 bp, Homo Sapiens
tcctcacacggggcacca

SEQ ID NO: 68331 - DNA, 17 bp, Homo Sapiens
tcctcgctggggcctcc

SEQ ID NO: 68332 - DNA, 18 bp, Homo Sapiens
tcctcgctggggcctcca

SEQ ID NO: 68333 - DNA, 17 bp, Homo Sapiens
tcctgtcggctacgcca

SEQ ID NO: 68334 - DNA, 17 bp, Homo Sapiens
tccttaggtcgctggtt

SEQ ID NO: 68335 - DNA, 18 bp, Homo Sapiens
tccttaggtcgctggttc

SEQ ID NO: 68336 - DNA, 19 bp, Homo Sapiens
tcgaaaccatcctctgcta

SEQ ID NO: 68337 - DNA, 20 bp, Homo Sapiens
tcgaaaccgggcggaaacac

SEQ ID NO: 68338 - DNA, 21 bp, Homo Sapiens
tcgaaccccactcctggtacc

SEQ ID NO: 68339 - DNA, 19 bp, Homo Sapiens
tcgaacctcagagggggca

SEQ ID NO: 68340 - DNA, 16 bp, Homo Sapiens
tcgaagaagcagcttc

SEQ ID NO: 68341 - DNA, 19 bp, Homo Sapiens
tcgaagaagcagcttcaaa

SEQ ID NO: 68342 - DNA, 20 bp, Homo Sapiens
tcgaagaagcagcttcaaac

SEQ ID NO: 68343 - DNA, 17 bp, Homo Sapiens
tcgaatccgagtcacgg

SEQ ID NO: 68344 - DNA, 21 bp, Homo Sapiens
tcgaatccggctcgaaggacc

SEQ ID NO: 68345 - DNA, 21 bp, Homo Sapiens
tcgaatcctgccgactacgcc

SEQ ID NO: 68346 - DNA, 22 bp, Homo Sapiens
tcgagcccacccagggacgcca

SEQ ID NO: 68347 - DNA, 20 bp, Homo Sapiens
tcgagtcccggcagagatgc

SEQ ID NO: 68348 - DNA, 22 bp, Homo Sapiens
tcgagtcccggcagagatgcca

SEQ ID NO: 68349 - DNA, 22 bp, Homo Sapiens
tcgagtcccggcggagtcgcca

SEQ ID NO: 68350 - DNA, 22 bp, Homo Sapiens
tcgatccccggcatctccacca

SEQ ID NO: 68351 - DNA, 19 bp, Homo Sapiens
tcgattccccgacggggag

SEQ ID NO: 68352 - DNA, 22 bp, Homo Sapiens
tcgattcccggccaatgcacca

SEQ ID NO: 68353 - DNA, 19 bp, Homo Sapiens
tcgattcccgggcggcgca

SEQ ID NO: 68354 - DNA, 21 bp, Homo Sapiens
tcgattcccggtcagggaacc

SEQ ID NO: 68355 - DNA, 21 bp, Homo Sapiens
tcgattccttccttttttgcc

SEQ ID NO: 68356 - DNA, 16 bp, Homo Sapiens
tcgggggcgtgggttc

SEQ ID NO: 68357 - DNA, 16 bp, Homo Sapiens
tcggtagagcatcaga

SEQ ID NO: 68358 - DNA, 17 bp, Homo Sapiens
tcggtagagcatcagac

SEQ ID NO: 68359 - DNA, 18 bp, Homo Sapiens
tcggtagagcatcagact

SEQ ID NO: 68360 - DNA, 21 bp, Homo Sapiens
tcggtagagcatcagactttt

SEQ ID NO: 68361 - DNA, 18 bp, Homo Sapiens
tcggtagagcatgagact

SEQ ID NO: 68362 - DNA, 17 bp, Homo Sapiens
tcggtttgggtccgaga

SEQ ID NO: 68363 - DNA, 19 bp, Homo Sapiens
tcgtatagtggttagtact

SEQ ID NO: 68364 - DNA, 16 bp, Homo Sapiens
tctgaaggtcctgagt

SEQ ID NO: 68365 - DNA, 19 bp, Homo Sapiens
tctgaatccagcgatccga

SEQ ID NO: 68366 - DNA, 18 bp, Homo Sapiens
tctgacaacagaggctta

SEQ ID NO: 68367 - DNA, 17 bp, Homo Sapiens
tctggactctgaatcca

SEQ ID NO: 68368 - DNA, 20 bp, Homo Sapiens
tctggactctgaatccagcg

SEQ ID NO: 68369 - DNA, 16 bp, Homo Sapiens
tctggactttgaatcc

SEQ ID NO: 68370 - DNA, 16 bp, Homo Sapiens
tctgtggcgcaatcgg

SEQ ID NO: 68371 - DNA, 17 bp, Homo Sapiens
tcttgcgacccgggttc

SEQ ID NO: 68372 - DNA, 19 bp, Homo Sapiens
tgaaaacctttttccaagg

SEQ ID NO: 68373 - DNA, 16 bp, Homo Sapiens
tgaaggtcgtgagttc

SEQ ID NO: 68374 - DNA, 17 bp, Homo Sapiens
tgaaggtcgtgagttcg

SEQ ID NO: 68375 - DNA, 17 bp, Homo Sapiens
tgaatccagcgatccga

SEQ ID NO: 68376 - DNA, 20 bp, Homo Sapiens
tgaatccagcgatccgagtt

SEQ ID NO: 68377 - DNA, 16 bp, Homo Sapiens
tgaatctgacaacaga

SEQ ID NO: 68378 - DNA, 22 bp, Homo Sapiens
tgaatctgacaacagaggctta

SEQ ID NO: 68379 - DNA, 23 bp, Homo Sapiens
tgaatctgacaacagaggcttac

SEQ ID NO: 68380 - DNA, 19 bp, Homo Sapiens
tgacaacagaggcttacga

SEQ ID NO: 68381 - DNA, 20 bp, Homo Sapiens
tgacaacagaggcttacgac

SEQ ID NO: 68382 - DNA, 17 bp, Homo Sapiens
tgacttcggatcagaag

SEQ ID NO: 68383 - DNA, 20 bp, Homo Sapiens
tgacttcggatcagaagatt

SEQ ID NO: 68384 - DNA, 22 bp, Homo Sapiens
tgacttcggatcagaagattga

SEQ ID NO: 68385 - DNA, 22 bp, Homo Sapiens
tgacttcggatcagaagattgc

SEQ ID NO: 68386 - DNA, 23 bp, Homo Sapiens
tgacttcggatcagaagattgca

SEQ ID NO: 68387 - DNA, 16 bp, Homo Sapiens
tgagggtccagggttc

SEQ ID NO: 68388 - DNA, 17 bp, Homo Sapiens
tgagggttcgagtccct

SEQ ID NO: 68389 - DNA, 17 bp, Homo Sapiens
tgattccggatcagaag

SEQ ID NO: 68390 - DNA, 21 bp, Homo Sapiens
tgattccggatcagaagattg

SEQ ID NO: 68391 - DNA, 19 bp, Homo Sapiens
tgattctcggtttgggtcc

SEQ ID NO: 68392 - DNA, 17 bp, Homo Sapiens
tgcaaattcgaagaagc

SEQ ID NO: 68393 - DNA, 22 bp, Homo Sapiens
tgcacgcgtgggttcgaatccc

SEQ ID NO: 68394 - DNA, 16 bp, Homo Sapiens
tgccacgcgggaggcc

SEQ ID NO: 68395 - DNA, 17 bp, Homo Sapiens
tgccacgcgggaggccc

SEQ ID NO: 68396 - DNA, 18 bp, Homo Sapiens
tgcccgcattctccacca

SEQ ID NO: 68397 - DNA, 19 bp, Homo Sapiens
tgcgagaggtcccgggttc

SEQ ID NO: 68398 - DNA, 19 bp, Homo Sapiens
tggactctgaatccagcga

SEQ ID NO: 68399 - DNA, 18 bp, Homo Sapiens
tggagttaaagacttttt

SEQ ID NO: 68400 - DNA, 18 bp, Homo Sapiens
tggataacgcgtctgact

SEQ ID NO: 68401 - DNA, 18 bp, Homo Sapiens
tggataaggcatcagcct

SEQ ID NO: 68402 - DNA, 19 bp, Homo Sapiens
tggataaggcatcagcctc

SEQ ID NO: 68403 - DNA, 16 bp, Homo Sapiens
tggatagcgcattgga

SEQ ID NO: 68404 - DNA, 17 bp, Homo Sapiens
tggatttaggctccagt

SEQ ID NO: 68405 - DNA, 17 bp, Homo Sapiens
tggcacggagaattttg

SEQ ID NO: 68406 - DNA, 17 bp, Homo Sapiens
tggccgagtggtctaag

SEQ ID NO: 68407 - DNA, 16 bp, Homo Sapiens
tggctaggattcggcg

SEQ ID NO: 68408 - DNA, 17 bp, Homo Sapiens
tggctaggattcggcgc

SEQ ID NO: 68409 - DNA, 23 bp, Homo Sapiens
tggctaggattcggcgctttcac

SEQ ID NO: 68410 - DNA, 16 bp, Homo Sapiens
tggctgatttgcgttc

SEQ ID NO: 68411 - DNA, 17 bp, Homo Sapiens
tgggcccataacccaga

SEQ ID NO: 68412 - DNA, 16 bp, Homo Sapiens
tggggtctccccgcgc

SEQ ID NO: 68413 - DNA, 16 bp, Homo Sapiens
tggggtttccccgcgc

SEQ ID NO: 68414 - DNA, 20 bp, Homo Sapiens
tggggtttccccgcgcaggt

SEQ ID NO: 68415 - DNA, 17 bp, Homo Sapiens
tgggttcgagtcccacc

SEQ ID NO: 68416 - DNA, 17 bp, Homo Sapiens
tgggttcgagtcccatc

SEQ ID NO: 68417 - DNA, 18 bp, Homo Sapiens
tggtagaattctcgcctg

SEQ ID NO: 68418 - DNA, 17 bp, Homo Sapiens
tggtagagcatttgact

SEQ ID NO: 68419 - DNA, 18 bp, Homo Sapiens
tggtagagcatttgactg

SEQ ID NO: 68420 - DNA, 19 bp, Homo Sapiens
tggtagagcatttgactgc

SEQ ID NO: 68421 - DNA, 17 bp, Homo Sapiens
tggtatcatgcaagatt

SEQ ID NO: 68422 - DNA, 19 bp, Homo Sapiens
tggtatcatgcaagattcc

SEQ ID NO: 68423 - DNA, 24 bp, Homo Sapiens
tggtcgtggttgtagtccgtgcga

SEQ ID NO: 68424 - DNA, 19 bp, Homo Sapiens
tggtctagcggttaggatt

SEQ ID NO: 68425 - DNA, 23 bp, Homo Sapiens
tggtctaggggtatgattctcgc

SEQ ID NO: 68426 - DNA, 23 bp, Homo Sapiens
tggtctagtggctaggattcggc

SEQ ID NO: 68427 - DNA, 19 bp, Homo Sapiens
tggtctagtggttaggatt

SEQ ID NO: 68428 - DNA, 24 bp, Homo Sapiens
tggtggtatagtggttagcatagc

SEQ ID NO: 68429 - DNA, 22 bp, Homo Sapiens
tggtggtctagtggttaggatt

SEQ ID NO: 68430 - DNA, 16 bp, Homo Sapiens
tggtgtagtggtatca

SEQ ID NO: 68431 - DNA, 17 bp, Homo Sapiens
tggttagcactctggac

SEQ ID NO: 68432 - DNA, 17 bp, Homo Sapiens
tggttagtactctgcgt

SEQ ID NO: 68433 - DNA, 17 bp, Homo Sapiens
tggttatcacgttcgcc

SEQ ID NO: 68434 - DNA, 20 bp, Homo Sapiens
tggttcaaatccgggtgccc

SEQ ID NO: 68435 - DNA, 16 bp, Homo Sapiens
tggttcgattccggct

SEQ ID NO: 68436 - DNA, 19 bp, Homo Sapiens
tggttcgattccggctcga

SEQ ID NO: 68437 - DNA, 18 bp, Homo Sapiens
tgtaaaccggagatgaaa

SEQ ID NO: 68438 - DNA, 18 bp, Homo Sapiens
tgtagtccgtgcgagaat

SEQ ID NO: 68439 - DNA, 20 bp, Homo Sapiens
tgtgaatctgacaacagagg

SEQ ID NO: 68440 - DNA, 21 bp, Homo Sapiens
tgtgaatctgacaacagaggc

SEQ ID NO: 68441 - DNA, 22 bp, Homo Sapiens
tgtgaatctgacaacagaggct

SEQ ID NO: 68442 - DNA, 24 bp, Homo Sapiens
tgttcgaatcacgtcggggtcacc

SEQ ID NO: 68443 - DNA, 19 bp, Homo Sapiens
ttaaaactttacagtcaga

SEQ ID NO: 68444 - DNA, 19 bp, Homo Sapiens
ttaaacaaaacgaatgatt

SEQ ID NO: 68445 - DNA, 22 bp, Homo Sapiens
ttaaagtggctgatttgcgttc

SEQ ID NO: 68446 - DNA, 21 bp, Homo Sapiens
ttaaattatgataatcatatt

SEQ ID NO: 68447 - DNA, 19 bp, Homo Sapiens
ttaacacaaagcacccaac

SEQ ID NO: 68448 - DNA, 21 bp, Homo Sapiens
ttaaccaaaacatcagattgt

SEQ ID NO: 68449 - DNA, 17 bp, Homo Sapiens
ttaatcccagggtcgtg

SEQ ID NO: 68450 - DNA, 17 bp, Homo Sapiens
ttaatctcagggtcgtg

SEQ ID NO: 68451 - DNA, 19 bp, Homo Sapiens
ttacctcctcaaagcaata

SEQ ID NO: 68452 - DNA, 19 bp, Homo Sapiens
ttacgaccccttatttacc

SEQ ID NO: 68453 - DNA, 16 bp, Homo Sapiens
ttagcactctggactc

SEQ ID NO: 68454 - DNA, 21 bp, Homo Sapiens
ttagcattaaccttttaagtt

SEQ ID NO: 68455 - DNA, 22 bp, Homo Sapiens
ttcaaatcccggacgagccccc

SEQ ID NO: 68456 - DNA, 22 bp, Homo Sapiens
ttcaaatctcggtggaacctcc

SEQ ID NO: 68457 - DNA, 23 bp, Homo Sapiens
ttcaaatctcggtggaacctcca

SEQ ID NO: 68458 - DNA, 17 bp, Homo Sapiens
ttcaagtccctgttcgg

SEQ ID NO: 68459 - DNA, 21 bp, Homo Sapiens
ttcacccaggcggcccgggtt

SEQ ID NO: 68460 - DNA, 17 bp, Homo Sapiens
ttcagtggtagaattct

SEQ ID NO: 68461 - DNA, 20 bp, Homo Sapiens
ttccaggttcgactcctggc

SEQ ID NO: 68462 - DNA, 17 bp, Homo Sapiens
ttccccgacggggagcc

SEQ ID NO: 68463 - DNA, 16 bp, Homo Sapiens
ttcccggccaacgcac

SEQ ID NO: 68464 - DNA, 16 bp, Homo Sapiens
ttcccggccaatgcac

SEQ ID NO: 68465 - DNA, 18 bp, Homo Sapiens
ttcccggccagggaacca

SEQ ID NO: 68466 - DNA, 18 bp, Homo Sapiens
ttccggatcagaagattg

SEQ ID NO: 68467 - DNA, 21 bp, Homo Sapiens
ttccggatcagaagattgagg

SEQ ID NO: 68468 - DNA, 23 bp, Homo Sapiens
ttccggatcagaagattgagggt

SEQ ID NO: 68469 - DNA, 18 bp, Homo Sapiens
ttcctcttcttaacacca

SEQ ID NO: 68470 - DNA, 17 bp, Homo Sapiens
ttccttccttttttgcc

SEQ ID NO: 68471 - DNA, 23 bp, Homo Sapiens
ttcgaaaccgggcggaaacacca

SEQ ID NO: 68472 - DNA, 17 bp, Homo Sapiens
ttcgaatcccagcggtg

SEQ ID NO: 68473 - DNA, 23 bp, Homo Sapiens
ttcgaatccgagtcacggcacca

SEQ ID NO: 68474 - DNA, 16 bp, Homo Sapiens
ttcgactcccggtatg

SEQ ID NO: 68475 - DNA, 17 bp, Homo Sapiens
ttcgactcccggtgtgg

SEQ ID NO: 68476 - DNA, 18 bp, Homo Sapiens
ttcgactcccggtgtggg

SEQ ID NO: 68477 - DNA, 16 bp, Homo Sapiens
ttcgagcccacccagg

SEQ ID NO: 68478 - DNA, 17 bp, Homo Sapiens
ttcgagcccacccaggg

SEQ ID NO: 68479 - DNA, 23 bp, Homo Sapiens
ttcgagcccacccagggacgcca

SEQ ID NO: 68480 - DNA, 17 bp, Homo Sapiens
ttcgagccccacgttgg

SEQ ID NO: 68481 - DNA, 23 bp, Homo Sapiens
ttcgagtcccggcagagatgcca

SEQ ID NO: 68482 - DNA, 23 bp, Homo Sapiens
ttcgatccccggcatctccacca

SEQ ID NO: 68483 - DNA, 23 bp, Homo Sapiens
ttcgattccccgacggggagcca

SEQ ID NO: 68484 - DNA, 20 bp, Homo Sapiens
ttcgattcccgggcggcgca

SEQ ID NO: 68485 - DNA, 16 bp, Homo Sapiens
ttcgattcccggtcag

SEQ ID NO: 68486 - DNA, 22 bp, Homo Sapiens
ttcgattccggctcgaaggacc

SEQ ID NO: 68487 - DNA, 19 bp, Homo Sapiens
ttcgggtgcgagaggtccc

SEQ ID NO: 68488 - DNA, 21 bp, Homo Sapiens
ttcgggtgcgagaggtcccgg

SEQ ID NO: 68489 - DNA, 16 bp, Homo Sapiens
ttctcgcctgccacgc

SEQ ID NO: 68490 - DNA, 16 bp, Homo Sapiens
ttctcgctggggcctc

SEQ ID NO: 68491 - DNA, 18 bp, Homo Sapiens
ttcttgcgacccgggttc

SEQ ID NO: 68492 - DNA, 25 bp, Homo Sapiens
ttgacaacattcaaaaaagagtacc

SEQ ID NO: 68493 - DNA, 23 bp, Homo Sapiens
ttgacccgggttcgattcccggc

SEQ ID NO: 68494 - DNA, 18 bp, Homo Sapiens
ttgagggttcgaatccct

SEQ ID NO: 68495 - DNA, 20 bp, Homo Sapiens
ttgagggttcgagtcccttc

SEQ ID NO: 68496 - DNA, 18 bp, Homo Sapiens
ttgcaaattcgaagaagc

SEQ ID NO: 68497 - DNA, 21 bp, Homo Sapiens
ttgcaaattcgaagaagcagc

SEQ ID NO: 68498 - DNA, 17 bp, Homo Sapiens
ttgcgttcagttgatgc

SEQ ID NO: 68499 - DNA, 18 bp, Homo Sapiens
ttgcgttcagttgatgca

SEQ ID NO: 68500 - DNA, 17 bp, Homo Sapiens
ttgggtgcgagaggtcc

SEQ ID NO: 68501 - DNA, 19 bp, Homo Sapiens
ttgggtgcgagaggtcccg

SEQ ID NO: 68502 - DNA, 17 bp, Homo Sapiens
ttggtggttcagtggta

SEQ ID NO: 68503 - DNA, 17 bp, Homo Sapiens
ttggtggttcgagccca

SEQ ID NO: 68504 - DNA, 17 bp, Homo Sapiens
ttgtggccgcagcaacc

SEQ ID NO: 68505 - DNA, 18 bp, Homo Sapiens
ttgtgggttcgagtccca

SEQ ID NO: 68506 - DNA, 20 bp, Homo Sapiens
ttgtgggttcgagtcccacc

SEQ ID NO: 68507 - DNA, 18 bp, Homo Sapiens
ttgtgggtttaagtccca

SEQ ID NO: 68508 - DNA, 19 bp, Homo Sapiens
tttaaccaaaacatcagat

SEQ ID NO: 68509 - DNA, 18 bp, Homo Sapiens
tttaggctccagtcattt

SEQ ID NO: 68510 - DNA, 25 bp, Homo Sapiens
tttcaacttaacttgaccgctctga

SEQ ID NO: 68511 - DNA, 20 bp, Homo Sapiens
tttcatattgaattgcaaat

SEQ ID NO: 68512 - DNA, 22 bp, Homo Sapiens
tttccgtagtgtagtggtcatc

SEQ ID NO: 68513 - DNA, 21 bp, Homo Sapiens
tttccgtagtgtagtggttat

SEQ ID NO: 68514 - DNA, 23 bp, Homo Sapiens
tttccgtagtgtagtggttatca

SEQ ID NO: 68515 - DNA, 19 bp, Homo Sapiens
tttgcgttcagttgatgca

SEQ ID NO: 68516 - DNA, 20 bp, Homo Sapiens
tttgggtgcgagaggtcccg

SEQ ID NO: 68517 - DNA, 19 bp, Homo Sapiens
tttgtgggtttaagtccca

SEQ ID NO: 68518 - DNA, 16 bp, Homo Sapiens
ttttgcagtccttacc

SEQ ID NO: 68519 - DNA, 16 bp, Homo Sapiens
tttttcatatcattgg

SEQ ID NO: 68520 - DNA, 20 bp, Homo Sapiens
aaacctttttccaaggacac

SEQ ID NO: 68521 - DNA, 20 bp, Homo Sapiens
aaactttacagtcagaggtt

SEQ ID NO: 68522 - DNA, 21 bp, Homo Sapiens
aaagcacccaacttacactta

SEQ ID NO: 68523 - DNA, 25 bp, Homo Sapiens
aaagctcacaagaactgctaactca

SEQ ID NO: 68524 - DNA, 25 bp, Homo Sapiens
aaaggtccccggttcgaaaccgggc

SEQ ID NO: 68525 - DNA, 25 bp, Homo Sapiens
aaaggttccgggttcgagtcccggc

SEQ ID NO: 68526 - DNA, 17 bp, Homo Sapiens
aaatcccggacgagccc

SEQ ID NO: 68527 - DNA, 20 bp, Homo Sapiens
aaatcccggacgagccccca

SEQ ID NO: 68528 - DNA, 17 bp, Homo Sapiens
aacacaaagcacccaac

SEQ ID NO: 68529 - DNA, 21 bp, Homo Sapiens
aaccaaaacatcagattgtga

SEQ ID NO: 68530 - DNA, 18 bp, Homo Sapiens
aaccccgtccgtgcctcc

SEQ ID NO: 68531 - DNA, 19 bp, Homo Sapiens
aacctttttccaaggacac

SEQ ID NO: 68532 - DNA, 16 bp, Homo Sapiens
aacttaacttgaccgc

SEQ ID NO: 68533 - DNA, 20 bp, Homo Sapiens
aactttacagtcagaggttc

SEQ ID NO: 68534 - DNA, 23 bp, Homo Sapiens
aagatcacgggttcgaaccccgt

SEQ ID NO: 68535 - DNA, 19 bp, Homo Sapiens
aagatcgcgggttcgaacc

SEQ ID NO: 68536 - DNA, 20 bp, Homo Sapiens
aagatcgcgggttcgaaccc

SEQ ID NO: 68537 - DNA, 22 bp, Homo Sapiens
aagattgagggttcgaatccct

SEQ ID NO: 68538 - DNA, 24 bp, Homo Sapiens
aagattgagggttcgaatccctcc

SEQ ID NO: 68539 - DNA, 24 bp, Homo Sapiens
aagattgagggttcgaatcccttc

SEQ ID NO: 68540 - DNA, 19 bp, Homo Sapiens
aagattgagggttcgagtc

SEQ ID NO: 68541 - DNA, 19 bp, Homo Sapiens
aagcagcttcaaacctgcc

SEQ ID NO: 68542 - DNA, 21 bp, Homo Sapiens
aagcagcttcaaacctgccgg

SEQ ID NO: 68543 - DNA, 24 bp, Homo Sapiens
aaggctgcgtgttcgaatcacgtc

SEQ ID NO: 68544 - DNA, 21 bp, Homo Sapiens
aagggcttagcttaattaaag

SEQ ID NO: 68545 - DNA, 24 bp, Homo Sapiens
aagggcttagcttaattaaagtgg

SEQ ID NO: 68546 - DNA, 19 bp, Homo Sapiens
aaggtccccggttcgaaac

SEQ ID NO: 68547 - DNA, 24 bp, Homo Sapiens
aaggtccccggttcgaaaccgggc

SEQ ID NO: 68548 - DNA, 19 bp, Homo Sapiens
aaggtcgcgggttcgatcc

SEQ ID NO: 68549 - DNA, 24 bp, Homo Sapiens
aaggtcgcgggttcgatccccgta

SEQ ID NO: 68550 - DNA, 24 bp, Homo Sapiens
aaggttggtggttcgagcccaccc

SEQ ID NO: 68551 - DNA, 24 bp, Homo Sapiens
aaggttgtgggttcgagtcccacc

SEQ ID NO: 68552 - DNA, 17 bp, Homo Sapiens
aatccagaggttccggg

SEQ ID NO: 68553 - DNA, 16 bp, Homo Sapiens
aatcccggacgagccc

SEQ ID NO: 68554 - DNA, 16 bp, Homo Sapiens
aatccgggtgccccct

SEQ ID NO: 68555 - DNA, 24 bp, Homo Sapiens
aatgccgaggttgtgagttcgagc

SEQ ID NO: 68556 - DNA, 22 bp, Homo Sapiens
aatggataaggcatcagcctcc

SEQ ID NO: 68557 - DNA, 20 bp, Homo Sapiens
aattagaatcttagctttgg

SEQ ID NO: 68558 - DNA, 16 bp, Homo Sapiens
aattcaaaggttccgg

SEQ ID NO: 68559 - DNA, 17 bp, Homo Sapiens
aattcaaaggttccggg

SEQ ID NO: 68560 - DNA, 18 bp, Homo Sapiens
aattcaaaggttccgggt

SEQ ID NO: 68561 - DNA, 20 bp, Homo Sapiens
aattcaaaggttccgggttc

SEQ ID NO: 68562 - DNA, 21 bp, Homo Sapiens
aattcaaaggttccgggttcg

SEQ ID NO: 68563 - DNA, 18 bp, Homo Sapiens
aattttggtgcaactcca

SEQ ID NO: 68564 - DNA, 20 bp, Homo Sapiens
acaaaacgaatgatttcgac

SEQ ID NO: 68565 - DNA, 23 bp, Homo Sapiens
acaacattcaaaaaagagtacca

SEQ ID NO: 68566 - DNA, 18 bp, Homo Sapiens
acacgcgaaaggtccccg

SEQ ID NO: 68567 - DNA, 17 bp, Homo Sapiens
acaggagatcctgggtt

SEQ ID NO: 68568 - DNA, 18 bp, Homo Sapiens
acatatgtccgcgtgggt

SEQ ID NO: 68569 - DNA, 18 bp, Homo Sapiens
acatggtctagcggttag

SEQ ID NO: 68570 - DNA, 19 bp, Homo Sapiens
acatggtctagcggttagg

SEQ ID NO: 68571 - DNA, 18 bp, Homo Sapiens
accaaaacatcagattgt

SEQ ID NO: 68572 - DNA, 19 bp, Homo Sapiens
accgaagatcacgggttcg

SEQ ID NO: 68573 - DNA, 19 bp, Homo Sapiens
accgaagatcgcgggttcg

SEQ ID NO: 68574 - DNA, 18 bp, Homo Sapiens
accgccgcggcccgggtt

SEQ ID NO: 68575 - DNA, 18 bp, Homo Sapiens
accgttaacttccaatta

SEQ ID NO: 68576 - DNA, 20 bp, Homo Sapiens
accgttaacttccaattaac

SEQ ID NO: 68577 - DNA, 21 bp, Homo Sapiens
accgttaacttccaattaact

SEQ ID NO: 68578 - DNA, 17 bp, Homo Sapiens
acctttttccaaggaca

SEQ ID NO: 68579 - DNA, 16 bp, Homo Sapiens
acgaggccccgggttc

SEQ ID NO: 68580 - DNA, 16 bp, Homo Sapiens
acgaggtcccgggttc

SEQ ID NO: 68581 - DNA, 17 bp, Homo Sapiens
acgccaaggtcgcgggt

SEQ ID NO: 68582 - DNA, 18 bp, Homo Sapiens
acgccaaggtcgcgggtt

SEQ ID NO: 68583 - DNA, 20 bp, Homo Sapiens
acgccaaggtcgcgggttcg

SEQ ID NO: 68584 - DNA, 16 bp, Homo Sapiens
acgcgaaaggtccccg

SEQ ID NO: 68585 - DNA, 17 bp, Homo Sapiens
acgcgaaaggtccccgg

SEQ ID NO: 68586 - DNA, 18 bp, Homo Sapiens
acgcgaaaggtccccggt

SEQ ID NO: 68587 - DNA, 19 bp, Homo Sapiens
acgcgaaaggtccccggtt

SEQ ID NO: 68588 - DNA, 20 bp, Homo Sapiens
acgttcgcctcacacgcgaa

SEQ ID NO: 68589 - DNA, 16 bp, Homo Sapiens
actcaagttctggtct

SEQ ID NO: 68590 - DNA, 21 bp, Homo Sapiens
actcaagttctggtctccaat

SEQ ID NO: 68591 - DNA, 21 bp, Homo Sapiens
actcaagttctggtctccgga

SEQ ID NO: 68592 - DNA, 22 bp, Homo Sapiens
actcaagttctggtctccggat

SEQ ID NO: 68593 - DNA, 18 bp, Homo Sapiens
actccagatcagaaggct

SEQ ID NO: 68594 - DNA, 20 bp, Homo Sapiens
actccagatcagaaggctgc

SEQ ID NO: 68595 - DNA, 20 bp, Homo Sapiens
actctggactctgaatccag

SEQ ID NO: 68596 - DNA, 19 bp, Homo Sapiens
actctggactttgaatcca

SEQ ID NO: 68597 - DNA, 21 bp, Homo Sapiens
actctggactttgaatccagc

SEQ ID NO: 68598 - DNA, 18 bp, Homo Sapiens
acttaagatccaatggac

SEQ ID NO: 68599 - DNA, 19 bp, Homo Sapiens
acttcggatcagaagattg

SEQ ID NO: 68600 - DNA, 20 bp, Homo Sapiens
acttcggatcagaagattga

SEQ ID NO: 68601 - DNA, 20 bp, Homo Sapiens
acttcggatcagaagattgc

SEQ ID NO: 68602 - DNA, 25 bp, Homo Sapiens
actttgtcaaagttaaattataggc

SEQ ID NO: 68603 - DNA, 25 bp, Homo Sapiens
acttttaaaggataacagctatcca

SEQ ID NO: 68604 - DNA, 19 bp, Homo Sapiens
agaaagctcacaagaactg

SEQ ID NO: 68605 - DNA, 24 bp, Homo Sapiens
agaaagctcacaagaactgctaac

SEQ ID NO: 68606 - DNA, 19 bp, Homo Sapiens
agaaccaacacctctttac

SEQ ID NO: 68607 - DNA, 24 bp, Homo Sapiens
agaagattgagggttcgaatccct

SEQ ID NO: 68608 - DNA, 17 bp, Homo Sapiens
agaaggttgcgtgttca

SEQ ID NO: 68609 - DNA, 18 bp, Homo Sapiens
agacaggggttaggcctc

SEQ ID NO: 68610 - DNA, 20 bp, Homo Sapiens
agacgggctcacatcacccc

SEQ ID NO: 68611 - DNA, 17 bp, Homo Sapiens
agactcaagttctggtc

SEQ ID NO: 68612 - DNA, 16 bp, Homo Sapiens
agagaaccaacacctc

SEQ ID NO: 68613 - DNA, 16 bp, Homo Sapiens
agagcatgggactctt

SEQ ID NO: 68614 - DNA, 20 bp, Homo Sapiens
agagcatttgactgcagatc

SEQ ID NO: 68615 - DNA, 16 bp, Homo Sapiens
agaggtagcgggatcg

SEQ ID NO: 68616 - DNA, 16 bp, Homo Sapiens
agaggtccccggttca

SEQ ID NO: 68617 - DNA, 20 bp, Homo Sapiens
agaggtcgatggatcgaaac

SEQ ID NO: 68618 - DNA, 16 bp, Homo Sapiens
agatcaagaggtcccc

SEQ ID NO: 68619 - DNA, 18 bp, Homo Sapiens
agatcacgggttcgaacc

SEQ ID NO: 68620 - DNA, 19 bp, Homo Sapiens
agatcacgggttcgaaccc

SEQ ID NO: 68621 - DNA, 20 bp, Homo Sapiens
agatcacgggttcgaacccc

SEQ ID NO: 68622 - DNA, 22 bp, Homo Sapiens
agatcacgggttcgaaccccgt

SEQ ID NO: 68623 - DNA, 23 bp, Homo Sapiens
agatcacgggttcgaaccccgtc

SEQ ID NO: 68624 - DNA, 21 bp, Homo Sapiens
agatcagaaggctgcgtgttc

SEQ ID NO: 68625 - DNA, 19 bp, Homo Sapiens
agatcgcgggttcgaaccc

SEQ ID NO: 68626 - DNA, 20 bp, Homo Sapiens
agatcgcgggttcgaacccc

SEQ ID NO: 68627 - DNA, 21 bp, Homo Sapiens
agatcgcgggttcgaaccccg

SEQ ID NO: 68628 - DNA, 23 bp, Homo Sapiens
agatcgcgggttcgaaccccgtc

SEQ ID NO: 68629 - DNA, 18 bp, Homo Sapiens
agattccaggttcgactc

SEQ ID NO: 68630 - DNA, 19 bp, Homo Sapiens
agattccaggttcgactcc

SEQ ID NO: 68631 - DNA, 23 bp, Homo Sapiens
agattccaggttcgactcctggc

SEQ ID NO: 68632 - DNA, 18 bp, Homo Sapiens
agattctaggttcgactc

SEQ ID NO: 68633 - DNA, 19 bp, Homo Sapiens
agattctaggttcgactcc

SEQ ID NO: 68634 - DNA, 18 bp, Homo Sapiens
agattgagggttcgaatc

SEQ ID NO: 68635 - DNA, 20 bp, Homo Sapiens
agattgagggttcgaatccc

SEQ ID NO: 68636 - DNA, 23 bp, Homo Sapiens
agattgagggttcgaatccctcc

SEQ ID NO: 68637 - DNA, 23 bp, Homo Sapiens
agattgagggttcgaatcccttc

SEQ ID NO: 68638 - DNA, 19 bp, Homo Sapiens
agattgagggttcgagtcc

SEQ ID NO: 68639 - DNA, 24 bp, Homo Sapiens
agcactctggactctgaatccagc

SEQ ID NO: 68640 - DNA, 21 bp, Homo Sapiens
agcatgggactcttaatccca

SEQ ID NO: 68641 - DNA, 19 bp, Homo Sapiens
agcatttgactgcagatca

SEQ ID NO: 68642 - DNA, 21 bp, Homo Sapiens
agcatttgactgcagatcaag

SEQ ID NO: 68643 - DNA, 18 bp, Homo Sapiens
agcctccggagctgggga

SEQ ID NO: 68644 - DNA, 24 bp, Homo Sapiens
agcgatccgagttcaaatctcggt

SEQ ID NO: 68645 - DNA, 18 bp, Homo Sapiens
agcggaagcgtgctgggc

SEQ ID NO: 68646 - DNA, 20 bp, Homo Sapiens
agcggaagcgtgctgggccc

SEQ ID NO: 68647 - DNA, 20 bp, Homo Sapiens
agcggttaggattcctggtt

SEQ ID NO: 68648 - DNA, 19 bp, Homo Sapiens
agcgtggccgagcggtcta

SEQ ID NO: 68649 - DNA, 21 bp, Homo Sapiens
agcgtggccgagcggtctaag

SEQ ID NO: 68650 - DNA, 25 bp, Homo Sapiens
agcttaaacccccttatttctacca

SEQ ID NO: 68651 - DNA, 24 bp, Homo Sapiens
agcttcaaacctgccggggcttcc

SEQ ID NO: 68652 - DNA, 19 bp, Homo Sapiens
aggatggccgagcggtcta

SEQ ID NO: 68653 - DNA, 20 bp, Homo Sapiens
aggatggccgagcggtctaa

SEQ ID NO: 68654 - DNA, 23 bp, Homo Sapiens
aggatggccgagtggtctaaggc

SEQ ID NO: 68655 - DNA, 16 bp, Homo Sapiens
aggattcctggttttc

SEQ ID NO: 68656 - DNA, 23 bp, Homo Sapiens
aggccccgggttcaatccccggc

SEQ ID NO: 68657 - DNA, 19 bp, Homo Sapiens
aggcgtctgacttcggatc

SEQ ID NO: 68658 - DNA, 22 bp, Homo Sapiens
aggcgtctgacttcggatcaga

SEQ ID NO: 68659 - DNA, 25 bp, Homo Sapiens
agggattgtgggttcgagtcccacc

SEQ ID NO: 68660 - DNA, 21 bp, Homo Sapiens
aggggtagagcatttgactgc

SEQ ID NO: 68661 - DNA, 21 bp, Homo Sapiens
agggtccagggttcatgtccc

SEQ ID NO: 68662 - DNA, 18 bp, Homo Sapiens
agggtcgtgggttcgagc

SEQ ID NO: 68663 - DNA, 23 bp, Homo Sapiens
agggttcaagtccctgttcgggc

SEQ ID NO: 68664 - DNA, 25 bp, Homo Sapiens
agggttcaagtccctgttcgggcgc

SEQ ID NO: 68665 - DNA, 18 bp, Homo Sapiens
aggtccccggttcgaaac

SEQ ID NO: 68666 - DNA, 19 bp, Homo Sapiens
aggtccccggttcgaaacc

SEQ ID NO: 68667 - DNA, 23 bp, Homo Sapiens
aggtccccggttcgaaaccgggc

SEQ ID NO: 68668 - DNA, 23 bp, Homo Sapiens
aggtccccggttcgatcccgggc

SEQ ID NO: 68669 - DNA, 24 bp, Homo Sapiens
aggtcccgggttcaaatcccggac

SEQ ID NO: 68670 - DNA, 17 bp, Homo Sapiens
aggtcctgagttcgaac

SEQ ID NO: 68671 - DNA, 18 bp, Homo Sapiens
aggtcctgagttcgaacc

SEQ ID NO: 68672 - DNA, 19 bp, Homo Sapiens
aggtcctgagttcgaacct

SEQ ID NO: 68673 - DNA, 20 bp, Homo Sapiens
aggtcctgagttcgaacctc

SEQ ID NO: 68674 - DNA, 19 bp, Homo Sapiens
aggtcgatggatcgaaacc

SEQ ID NO: 68675 - DNA, 20 bp, Homo Sapiens
aggtcgatggatcgaaacca

SEQ ID NO: 68676 - DNA, 23 bp, Homo Sapiens
aggtcgatggatcgaaaccatcc

SEQ ID NO: 68677 - DNA, 18 bp, Homo Sapiens
aggtcgcgggttcgaacc

SEQ ID NO: 68678 - DNA, 18 bp, Homo Sapiens
aggtcgtgagttcgagcc

SEQ ID NO: 68679 - DNA, 19 bp, Homo Sapiens
aggtcgtgagttcgagcct

SEQ ID NO: 68680 - DNA, 24 bp, Homo Sapiens
aggtcgtgagttcgagcctcacac

SEQ ID NO: 68681 - DNA, 17 bp, Homo Sapiens
aggtcgtgagttcgatc

SEQ ID NO: 68682 - DNA, 18 bp, Homo Sapiens
aggtcgtgagttcgatcc

SEQ ID NO: 68683 - DNA, 19 bp, Homo Sapiens
aggtcgtgagttcgatcct

SEQ ID NO: 68684 - DNA, 24 bp, Homo Sapiens
aggtcgtgagttcgatcctcacac

SEQ ID NO: 68685 - DNA, 19 bp, Homo Sapiens
aggttccgggttcgagtcc

SEQ ID NO: 68686 - DNA, 20 bp, Homo Sapiens
aggttccgggttcgagtccc

SEQ ID NO: 68687 - DNA, 17 bp, Homo Sapiens
aggttcgactcctggct

SEQ ID NO: 68688 - DNA, 18 bp, Homo Sapiens
aggttcgagtcctgccgc

SEQ ID NO: 68689 - DNA, 18 bp, Homo Sapiens
aggttgcgtgttcaaatc

SEQ ID NO: 68690 - DNA, 23 bp, Homo Sapiens
aggttgcgtgttcaaatcacgtc

SEQ ID NO: 68691 - DNA, 23 bp, Homo Sapiens
aggttgcgtgttcaagtcacgtc

SEQ ID NO: 68692 - DNA, 17 bp, Homo Sapiens
aggttggtggttcgagc

SEQ ID NO: 68693 - DNA, 19 bp, Homo Sapiens
aggttggtggttcgagccc

SEQ ID NO: 68694 - DNA, 20 bp, Homo Sapiens
aggttggtggttcgagccca

SEQ ID NO: 68695 - DNA, 22 bp, Homo Sapiens
aggttggtggttcgagcccacc

SEQ ID NO: 68696 - DNA, 23 bp, Homo Sapiens
aggttggtggttcgagcccaccc

SEQ ID NO: 68697 - DNA, 23 bp, Homo Sapiens
aggttggtggttcgttcccaccc

SEQ ID NO: 68698 - DNA, 18 bp, Homo Sapiens
aggttgtgagttcgagcc

SEQ ID NO: 68699 - DNA, 20 bp, Homo Sapiens
aggttgtgagttcgagcctc

SEQ ID NO: 68700 - DNA, 23 bp, Homo Sapiens
aggttgtgagttcgagcctcacc

SEQ ID NO: 68701 - DNA, 18 bp, Homo Sapiens
aggttgtgagttcgatcc

SEQ ID NO: 68702 - DNA, 20 bp, Homo Sapiens
aggttgtgagttcgatcctc

SEQ ID NO: 68703 - DNA, 18 bp, Homo Sapiens
aggttgtgggttcgaatc

SEQ ID NO: 68704 - DNA, 21 bp, Homo Sapiens
aggttgtgggttcgaatccca

SEQ ID NO: 68705 - DNA, 22 bp, Homo Sapiens
aggttgtgggttcgaatcccac

SEQ ID NO: 68706 - DNA, 20 bp, Homo Sapiens
aggttgtgggttcgagtccc

SEQ ID NO: 68707 - DNA, 22 bp, Homo Sapiens
aggttgtgggttcgagtcccac

SEQ ID NO: 68708 - DNA, 23 bp, Homo Sapiens
agtaaggtcagctaaataagcta

SEQ ID NO: 68709 - DNA, 24 bp, Homo Sapiens
agtaaggtcagctaaataagctat

SEQ ID NO: 68710 - DNA, 24 bp, Homo Sapiens
agtaccgttaacttccaattaact

SEQ ID NO: 68711 - DNA, 16 bp, Homo Sapiens
agtcacgtcggggtca

SEQ ID NO: 68712 - DNA, 18 bp, Homo Sapiens
agtggggttttgcagtcc

SEQ ID NO: 68713 - DNA, 23 bp, Homo Sapiens
agtggtagaattctcgcctgcca

SEQ ID NO: 68714 - DNA, 20 bp, Homo Sapiens
agtggtagagcatttgactg

SEQ ID NO: 68715 - DNA, 22 bp, Homo Sapiens
agtggtagagcatttgactgca

SEQ ID NO: 68716 - DNA, 19 bp, Homo Sapiens
agtggtatcatgcaagatt

SEQ ID NO: 68717 - DNA, 18 bp, Homo Sapiens
agtggtcatcacgttcgc

SEQ ID NO: 68718 - DNA, 19 bp, Homo Sapiens
agtggtcatcacgttcgcc

SEQ ID NO: 68719 - DNA, 18 bp, Homo Sapiens
agtggttatcacgttcgc

SEQ ID NO: 68720 - DNA, 19 bp, Homo Sapiens
agtggttatcacgttcgcc

SEQ ID NO: 68721 - DNA, 21 bp, Homo Sapiens
agtggttatcacgttcgcctc

SEQ ID NO: 68722 - DNA, 23 bp, Homo Sapiens
agtggttatcacgttcgcctcac

SEQ ID NO: 68723 - DNA, 19 bp, Homo Sapiens
agttaaagactttttctct

SEQ ID NO: 68724 - DNA, 17 bp, Homo Sapiens
agttcaaatctcggtgg

SEQ ID NO: 68725 - DNA, 23 bp, Homo Sapiens
agttctggtctccggatggaggc

SEQ ID NO: 68726 - DNA, 25 bp, Homo Sapiens
agttgacccgggttcgattcccggc

SEQ ID NO: 68727 - DNA, 16 bp, Homo Sapiens
ataacagctatccatt

SEQ ID NO: 68728 - DNA, 25 bp, Homo Sapiens
ataagctatcgggcccataccccga

SEQ ID NO: 68729 - DNA, 16 bp, Homo Sapiens
atattgaattgcaaat

SEQ ID NO: 68730 - DNA, 19 bp, Homo Sapiens
atcaagaggtccctggttc

SEQ ID NO: 68731 - DNA, 20 bp, Homo Sapiens
atcacgggttcgaaccccgt

SEQ ID NO: 68732 - DNA, 19 bp, Homo Sapiens
atcagaagattgagggttc

SEQ ID NO: 68733 - DNA, 18 bp, Homo Sapiens
atcagattgtgaatctga

SEQ ID NO: 68734 - DNA, 17 bp, Homo Sapiens
atcattggtcgtggttg

SEQ ID NO: 68735 - DNA, 18 bp, Homo Sapiens
atcattggtcgtggttgt

SEQ ID NO: 68736 - DNA, 16 bp, Homo Sapiens
atcccatcctcgtcgc

SEQ ID NO: 68737 - DNA, 18 bp, Homo Sapiens
atcctgggttcgaatccc

SEQ ID NO: 68738 - DNA, 21 bp, Homo Sapiens
atcctgggttcgaatcccagc

SEQ ID NO: 68739 - DNA, 22 bp, Homo Sapiens
atcgaaaccatcctctgctacc

SEQ ID NO: 68740 - DNA, 17 bp, Homo Sapiens
atcgcgggttcgaaccc

SEQ ID NO: 68741 - DNA, 18 bp, Homo Sapiens
atcgcgggttcgaacccc

SEQ ID NO: 68742 - DNA, 19 bp, Homo Sapiens
atctaaaggtccctggttc

SEQ ID NO: 68743 - DNA, 22 bp, Homo Sapiens
atgaaaacctttttccaaggac

SEQ ID NO: 68744 - DNA, 23 bp, Homo Sapiens
atgaaaacctttttccaaggaca

SEQ ID NO: 68745 - DNA, 18 bp, Homo Sapiens
atgagactcttaatctca

SEQ ID NO: 68746 - DNA, 17 bp, Homo Sapiens
atgaggtcccgggttcg

SEQ ID NO: 68747 - DNA, 24 bp, Homo Sapiens
atgattctcgcttcgggtgcgaga

SEQ ID NO: 68748 - DNA, 24 bp, Homo Sapiens
atgattctcgctttgggtgcgaga

SEQ ID NO: 68749 - DNA, 16 bp, Homo Sapiens
atgcccccatgtctaa

SEQ ID NO: 68750 - DNA, 19 bp, Homo Sapiens
atgccgaggttgtgagttc

SEQ ID NO: 68751 - DNA, 17 bp, Homo Sapiens
atggataaggcgtctga

SEQ ID NO: 68752 - DNA, 17 bp, Homo Sapiens
atggatcgaaaccatcc

SEQ ID NO: 68753 - DNA, 19 bp, Homo Sapiens
atggatcgaaaccatcctc

SEQ ID NO: 68754 - DNA, 20 bp, Homo Sapiens
atggatcgaaaccatcctct

SEQ ID NO: 68755 - DNA, 17 bp, Homo Sapiens
atggccgagtggttaag

SEQ ID NO: 68756 - DNA, 18 bp, Homo Sapiens
atggccgagtggttaagg

SEQ ID NO: 68757 - DNA, 24 bp, Homo Sapiens
atgggtggttcagtggtagaattc

SEQ ID NO: 68758 - DNA, 16 bp, Homo Sapiens
atggtagagcgctcgc

SEQ ID NO: 68759 - DNA, 21 bp, Homo Sapiens
atggtggagttaaagactttt

SEQ ID NO: 68760 - DNA, 18 bp, Homo Sapiens
atggttagcactctggac

SEQ ID NO: 68761 - DNA, 25 bp, Homo Sapiens
atgtctaacaacatggctttctcac

SEQ ID NO: 68762 - DNA, 19 bp, Homo Sapiens
attagctcaaatggtagag

SEQ ID NO: 68763 - DNA, 18 bp, Homo Sapiens
attcaaaggttccgggtt

SEQ ID NO: 68764 - DNA, 20 bp, Homo Sapiens
attccggatcagaagattga

SEQ ID NO: 68765 - DNA, 18 bp, Homo Sapiens
attcctcttcttaacacc

SEQ ID NO: 68766 - DNA, 17 bp, Homo Sapiens
attctaggttcgactcc

SEQ ID NO: 68767 - DNA, 17 bp, Homo Sapiens
attctcgcctgccacgc

SEQ ID NO: 68768 - DNA, 21 bp, Homo Sapiens
attctcgcctgccacgcggga

SEQ ID NO: 68769 - DNA, 19 bp, Homo Sapiens
attctcgctggggcctcca

SEQ ID NO: 68770 - DNA, 21 bp, Homo Sapiens
attctcggtttgggtccgaga

SEQ ID NO: 68771 - DNA, 21 bp, Homo Sapiens
attgagggttcgaatcccttc

SEQ ID NO: 68772 - DNA, 19 bp, Homo Sapiens
attgcaaattcgaagaagc

SEQ ID NO: 68773 - DNA, 20 bp, Homo Sapiens
attgcaaattcgaagaagca

SEQ ID NO: 68774 - DNA, 21 bp, Homo Sapiens
attgcaggttcgagtcctgcc

SEQ ID NO: 68775 - DNA, 16 bp, Homo Sapiens
attggcctcctaagcc

SEQ ID NO: 68776 - DNA, 21 bp, Homo Sapiens
attgtgggttcgagtcccacc

SEQ ID NO: 68777 - DNA, 18 bp, Homo Sapiens
atttgactgcagatcaag

SEQ ID NO: 68778 - DNA, 22 bp, Homo Sapiens
caaaacatcagattgtgaatct

SEQ ID NO: 68779 - DNA, 22 bp, Homo Sapiens
caacttacacttaggagatttc

SEQ ID NO: 68780 - DNA, 18 bp, Homo Sapiens
caagaggtccccggttca

SEQ ID NO: 68781 - DNA, 18 bp, Homo Sapiens
caagaggtccctggttca

SEQ ID NO: 68782 - DNA, 16 bp, Homo Sapiens
caaggtcgcgggttcg

SEQ ID NO: 68783 - DNA, 17 bp, Homo Sapiens
caagttctggtctccaa

SEQ ID NO: 68784 - DNA, 19 bp, Homo Sapiens
caattaactagttttgaca

SEQ ID NO: 68785 - DNA, 24 bp, Homo Sapiens
caattaactagttttgacaacatt

SEQ ID NO: 68786 - DNA, 19 bp, Homo Sapiens
cacatggtctagcggttag

SEQ ID NO: 68787 - DNA, 19 bp, Homo Sapiens
cacgcgggagaccggggtt

SEQ ID NO: 68788 - DNA, 20 bp, Homo Sapiens
cacgcgggagaccggggttc

SEQ ID NO: 68789 - DNA, 17 bp, Homo Sapiens
cactctggactctgaat

SEQ ID NO: 68790 - DNA, 19 bp, Homo Sapiens
cactctggactttgaatcc

SEQ ID NO: 68791 - DNA, 20 bp, Homo Sapiens
cactctggactttgaatcca

SEQ ID NO: 68792 - DNA, 22 bp, Homo Sapiens
cactctggactttgaatccagc

SEQ ID NO: 68793 - DNA, 16 bp, Homo Sapiens
cagaagattctaggtt

SEQ ID NO: 68794 - DNA, 18 bp, Homo Sapiens
cagaagattctaggttcg

SEQ ID NO: 68795 - DNA, 17 bp, Homo Sapiens
cagaaggtcctgggttc

SEQ ID NO: 68796 - DNA, 16 bp, Homo Sapiens
cagagcatttgactgc

SEQ ID NO: 68797 - DNA, 19 bp, Homo Sapiens
cagcctccggagctgggga

SEQ ID NO: 68798 - DNA, 19 bp, Homo Sapiens
cagcggaagcgtgctgggc

SEQ ID NO: 68799 - DNA, 18 bp, Homo Sapiens
cagcttcaaacctgccgg

SEQ ID NO: 68800 - DNA, 16 bp, Homo Sapiens
caggatggccgagcgg

SEQ ID NO: 68801 - DNA, 22 bp, Homo Sapiens
cagggttcaagtccctgttcgg

SEQ ID NO: 68802 - DNA, 21 bp, Homo Sapiens
cagtcggtagagcatgagacc

SEQ ID NO: 68803 - DNA, 22 bp, Homo Sapiens
cagtggtagagcatttgactgc

SEQ ID NO: 68804 - DNA, 19 bp, Homo Sapiens
catatcattggtcgtggtt

SEQ ID NO: 68805 - DNA, 18 bp, Homo Sapiens
catattgaattgcaaatt

SEQ ID NO: 68806 - DNA, 19 bp, Homo Sapiens
catgagactcttaatctca

SEQ ID NO: 68807 - DNA, 18 bp, Homo Sapiens
catgcccccatgtctaac

SEQ ID NO: 68808 - DNA, 18 bp, Homo Sapiens
catgggactcttaatccc

SEQ ID NO: 68809 - DNA, 23 bp, Homo Sapiens
catgtctaacaacatggctttct

SEQ ID NO: 68810 - DNA, 24 bp, Homo Sapiens
cattcttgcgacccgggttcgatt

SEQ ID NO: 68811 - DNA, 19 bp, Homo Sapiens
cattggacttctaattcaa

SEQ ID NO: 68812 - DNA, 17 bp, Homo Sapiens
cattggcctcctaagcc

SEQ ID NO: 68813 - DNA, 18 bp, Homo Sapiens
cattggcctcctaagcca

SEQ ID NO: 68814 - DNA, 18 bp, Homo Sapiens
cattggtcgtggttgtag

SEQ ID NO: 68815 - DNA, 18 bp, Homo Sapiens
catttcataactttgtca

SEQ ID NO: 68816 - DNA, 17 bp, Homo Sapiens
catttgactgcagatca

SEQ ID NO: 68817 - DNA, 23 bp, Homo Sapiens
ccaacacctctttacagtgacca

SEQ ID NO: 68818 - DNA, 20 bp, Homo Sapiens
ccaacttacacttaggagat

SEQ ID NO: 68819 - DNA, 21 bp, Homo Sapiens
ccacatggtctagcggttagg

SEQ ID NO: 68820 - DNA, 16 bp, Homo Sapiens
ccagaggttccgggtt

SEQ ID NO: 68821 - DNA, 18 bp, Homo Sapiens
ccagaggttccgggttcg

SEQ ID NO: 68822 - DNA, 17 bp, Homo Sapiens
ccagatcagaaggctgc

SEQ ID NO: 68823 - DNA, 17 bp, Homo Sapiens
ccagatcagaaggttgc

SEQ ID NO: 68824 - DNA, 18 bp, Homo Sapiens
ccaggggtcgcgagttca

SEQ ID NO: 68825 - DNA, 19 bp, Homo Sapiens
ccatagtgtagtggttatc

SEQ ID NO: 68826 - DNA, 20 bp, Homo Sapiens
ccattcttgcgacccgggtt

SEQ ID NO: 68827 - DNA, 20 bp, Homo Sapiens
ccattggtcttaggccccaa

SEQ ID NO: 68828 - DNA, 18 bp, Homo Sapiens
cccataacccagaggtcg

SEQ ID NO: 68829 - DNA, 20 bp, Homo Sapiens
cccataacccagaggtcgat

SEQ ID NO: 68830 - DNA, 22 bp, Homo Sapiens
cccattcttgcgacccgggttc

SEQ ID NO: 68831 - DNA, 16 bp, Homo Sapiens
cccggcagagatgcca

SEQ ID NO: 68832 - DNA, 19 bp, Homo Sapiens
cccgggttcgattcccggc

SEQ ID NO: 68833 - DNA, 18 bp, Homo Sapiens
ccctggtggtctagtggt

SEQ ID NO: 68834 - DNA, 19 bp, Homo Sapiens
ccgaaaggttggtggttcg

SEQ ID NO: 68835 - DNA, 18 bp, Homo Sapiens
ccgaagatcgcgggttcg

SEQ ID NO: 68836 - DNA, 16 bp, Homo Sapiens
ccgagaggtcccgggt

SEQ ID NO: 68837 - DNA, 17 bp, Homo Sapiens
ccgagaggtcccgggtt

SEQ ID NO: 68838 - DNA, 18 bp, Homo Sapiens
ccgagaggtcccgggttc

SEQ ID NO: 68839 - DNA, 17 bp, Homo Sapiens
ccgaggttgtgagttcg

SEQ ID NO: 68840 - DNA, 18 bp, Homo Sapiens
ccgccgcggcccgggttc

SEQ ID NO: 68841 - DNA, 17 bp, Homo Sapiens
ccggagctggggattgt

SEQ ID NO: 68842 - DNA, 18 bp, Homo Sapiens
ccggatagctcagtcggt

SEQ ID NO: 68843 - DNA, 21 bp, Homo Sapiens
ccggatcagaagattgagggt

SEQ ID NO: 68844 - DNA, 18 bp, Homo Sapiens
ccggttagctcagtcggc

SEQ ID NO: 68845 - DNA, 18 bp, Homo Sapiens
ccggttagctcagttggt

SEQ ID NO: 68846 - DNA, 17 bp, Homo Sapiens
ccggttcgaaaccgggc

SEQ ID NO: 68847 - DNA, 18 bp, Homo Sapiens
ccgtagtgtagtggttat

SEQ ID NO: 68848 - DNA, 16 bp, Homo Sapiens
cctcacctggagcacc

SEQ ID NO: 68849 - DNA, 19 bp, Homo Sapiens
cctgccacgcgggaggccc

SEQ ID NO: 68850 - DNA, 16 bp, Homo Sapiens
cctgccggggcttcca

SEQ ID NO: 68851 - DNA, 19 bp, Homo Sapiens
cctgggttcgaatcccagc

SEQ ID NO: 68852 - DNA, 17 bp, Homo Sapiens
ccttaggtcgctggttc

SEQ ID NO: 68853 - DNA, 20 bp, Homo Sapiens
ccttccaagcagttgacccg

SEQ ID NO: 68854 - DNA, 23 bp, Homo Sapiens
ccttccaagcagttgacccgggt

SEQ ID NO: 68855 - DNA, 18 bp, Homo Sapiens
ccttcgatagctcagctg

SEQ ID NO: 68856 - DNA, 18 bp, Homo Sapiens
ccttttaagttaaagatt

SEQ ID NO: 68857 - DNA, 17 bp, Homo Sapiens
cctttttccaaggacac

SEQ ID NO: 68858 - DNA, 18 bp, Homo Sapiens
cgaaaggtccccggttcg

SEQ ID NO: 68859 - DNA, 18 bp, Homo Sapiens
cgaaaggttggtggttcg

SEQ ID NO: 68860 - DNA, 21 bp, Homo Sapiens
cgaaccccgtccgtgcctcca

SEQ ID NO: 68861 - DNA, 17 bp, Homo Sapiens
cgaagatcgcgggttcg

SEQ ID NO: 68862 - DNA, 16 bp, Homo Sapiens
cgagaggtcccgggtt

SEQ ID NO: 68863 - DNA, 19 bp, Homo Sapiens
cgagcccacccagggacgc

SEQ ID NO: 68864 - DNA, 16 bp, Homo Sapiens
cgaggttgtgagttcg

SEQ ID NO: 68865 - DNA, 17 bp, Homo Sapiens
cgagttcaaatctcgct

SEQ ID NO: 68866 - DNA, 17 bp, Homo Sapiens
cgagttcaaatctcggt

SEQ ID NO: 68867 - DNA, 22 bp, Homo Sapiens
cgatccgagttcaaatctcggt

SEQ ID NO: 68868 - DNA, 18 bp, Homo Sapiens
cgcagcaacctcggttcg

SEQ ID NO: 68869 - DNA, 16 bp, Homo Sapiens
cgccaaggtcgcgggt

SEQ ID NO: 68870 - DNA, 20 bp, Homo Sapiens
cgcccggctagctcagtcgg

SEQ ID NO: 68871 - DNA, 16 bp, Homo Sapiens
cgcctgtcacgcggga

SEQ ID NO: 68872 - DNA, 19 bp, Homo Sapiens
cgcgggttcgatccccgta

SEQ ID NO: 68873 - DNA, 18 bp, Homo Sapiens
cgcttcgggtgcgagagg

SEQ ID NO: 68874 - DNA, 20 bp, Homo Sapiens
cggaagcgtgctgggcccat

SEQ ID NO: 68875 - DNA, 18 bp, Homo Sapiens
cggagctggggattgtgg

SEQ ID NO: 68876 - DNA, 18 bp, Homo Sapiens
cggatcagaagattccag

SEQ ID NO: 68877 - DNA, 18 bp, Homo Sapiens
cggatcagaagattctag

SEQ ID NO: 68878 - DNA, 21 bp, Homo Sapiens
cggctagctcagtcggtagag

SEQ ID NO: 68879 - DNA, 16 bp, Homo Sapiens
cgggagaccggggttc

SEQ ID NO: 68880 - DNA, 19 bp, Homo Sapiens
cggggatgtagctcagtgg

SEQ ID NO: 68881 - DNA, 19 bp, Homo Sapiens
cgggggtgtagctcagtgg

SEQ ID NO: 68882 - DNA, 18 bp, Homo Sapiens
cgggtgcgagaggtcccg

SEQ ID NO: 68883 - DNA, 19 bp, Homo Sapiens
cgggtgcgagaggtcccgg

SEQ ID NO: 68884 - DNA, 22 bp, Homo Sapiens
cgggttcgatccccgtacgggc

SEQ ID NO: 68885 - DNA, 19 bp, Homo Sapiens
cggtagagcatttgactgc

SEQ ID NO: 68886 - DNA, 19 bp, Homo Sapiens
cggtctaaggcgctgcgtt

SEQ ID NO: 68887 - DNA, 17 bp, Homo Sapiens
cggttagctcagtcggc

SEQ ID NO: 68888 - DNA, 16 bp, Homo Sapiens
cggttagctcagttgg

SEQ ID NO: 68889 - DNA, 18 bp, Homo Sapiens
cggttaggattcctggtt

SEQ ID NO: 68890 - DNA, 21 bp, Homo Sapiens
cggttatcacgtctgctttac

SEQ ID NO: 68891 - DNA, 18 bp, Homo Sapiens
cggttcaaatccgggtgc

SEQ ID NO: 68892 - DNA, 16 bp, Homo Sapiens
cggttcgatcccgggc

SEQ ID NO: 68893 - DNA, 20 bp, Homo Sapiens
cgtctctgtggcgcaatcgg

SEQ ID NO: 68894 - DNA, 18 bp, Homo Sapiens
cgtgctgggcccataacc

SEQ ID NO: 68895 - DNA, 21 bp, Homo Sapiens
cgtgctgggcccataacccag

SEQ ID NO: 68896 - DNA, 18 bp, Homo Sapiens
cgtggccgagtggttaag

SEQ ID NO: 68897 - DNA, 18 bp, Homo Sapiens
cgttaacttccaattaac

SEQ ID NO: 68898 - DNA, 19 bp, Homo Sapiens
cgttaacttccaattaact

SEQ ID NO: 68899 - DNA, 19 bp, Homo Sapiens
cgttcgcctcacacgcgaa

SEQ ID NO: 68900 - DNA, 17 bp, Homo Sapiens
ctaaaggtccctggttc

SEQ ID NO: 68901 - DNA, 19 bp, Homo Sapiens
ctaatccattgtgctttgc

SEQ ID NO: 68902 - DNA, 24 bp, Homo Sapiens
ctaatggataaggcatcagcctcc

SEQ ID NO: 68903 - DNA, 18 bp, Homo Sapiens
ctaattcaaaggttccgg

SEQ ID NO: 68904 - DNA, 19 bp, Homo Sapiens
ctaattcaaaggttccggg

SEQ ID NO: 68905 - DNA, 18 bp, Homo Sapiens
ctaattcaaaggttgtgg

SEQ ID NO: 68906 - DNA, 22 bp, Homo Sapiens
ctagcggttaggattcctggtt

SEQ ID NO: 68907 - DNA, 18 bp, Homo Sapiens
ctagctcagtcggtagag

SEQ ID NO: 68908 - DNA, 18 bp, Homo Sapiens
ctaggggtatgattctcg

SEQ ID NO: 68909 - DNA, 22 bp, Homo Sapiens
ctagtggttaggattcggcgct

SEQ ID NO: 68910 - DNA, 22 bp, Homo Sapiens
ctatccattggtcttaggcccc

SEQ ID NO: 68911 - DNA, 24 bp, Homo Sapiens
ctatccattggtcttaggccccaa

SEQ ID NO: 68912 - DNA, 19 bp, Homo Sapiens
ctcacacgcgaaaggtccc

SEQ ID NO: 68913 - DNA, 20 bp, Homo Sapiens
ctcacacgcgaaaggtcccc

SEQ ID NO: 68914 - DNA, 18 bp, Homo Sapiens
ctcagtggtagagcattt

SEQ ID NO: 68915 - DNA, 19 bp, Homo Sapiens
ctccagatcagaaggctgc

SEQ ID NO: 68916 - DNA, 19 bp, Homo Sapiens
ctccagatcagaaggttgc

SEQ ID NO: 68917 - DNA, 19 bp, Homo Sapiens
ctctgaatccagcgatccg

SEQ ID NO: 68918 - DNA, 21 bp, Homo Sapiens
ctctgaatccagcgatccgag

SEQ ID NO: 68919 - DNA, 24 bp, Homo Sapiens
ctctgaatccagcgatccgagttc

SEQ ID NO: 68920 - DNA, 18 bp, Homo Sapiens
ctctggactctgaatcca

SEQ ID NO: 68921 - DNA, 17 bp, Homo Sapiens
ctctggactttgaatcc

SEQ ID NO: 68922 - DNA, 20 bp, Homo Sapiens
ctctggactttgaatccagc

SEQ ID NO: 68923 - DNA, 19 bp, Homo Sapiens
ctcttaatctcagggtcgt

SEQ ID NO: 68924 - DNA, 16 bp, Homo Sapiens
ctgaaggtcgtgagtt

SEQ ID NO: 68925 - DNA, 16 bp, Homo Sapiens
ctgaatccagcgatcc

SEQ ID NO: 68926 - DNA, 21 bp, Homo Sapiens
ctgaatccagcgatccgagtt

SEQ ID NO: 68927 - DNA, 19 bp, Homo Sapiens
ctgactacggatcagaaga

SEQ ID NO: 68928 - DNA, 16 bp, Homo Sapiens
ctgactccagatcaga

SEQ ID NO: 68929 - DNA, 17 bp, Homo Sapiens
ctgactccagatcagaa

SEQ ID NO: 68930 - DNA, 20 bp, Homo Sapiens
ctgactccagatcagaaggc

SEQ ID NO: 68931 - DNA, 21 bp, Homo Sapiens
ctgactccagatcagaaggct

SEQ ID NO: 68932 - DNA, 23 bp, Homo Sapiens
ctgactccagatcagaaggctgc

SEQ ID NO: 68933 - DNA, 23 bp, Homo Sapiens
ctgactccagatcagaaggttgc

SEQ ID NO: 68934 - DNA, 16 bp, Homo Sapiens
ctgacttcggatcaga

SEQ ID NO: 68935 - DNA, 17 bp, Homo Sapiens
ctgacttcggatcagaa

SEQ ID NO: 68936 - DNA, 16 bp, Homo Sapiens
ctgattccggatcaga

SEQ ID NO: 68937 - DNA, 18 bp, Homo Sapiens
ctgattccggatcagaag

SEQ ID NO: 68938 - DNA, 18 bp, Homo Sapiens
ctgcagatcaagaggtcc

SEQ ID NO: 68939 - DNA, 19 bp, Homo Sapiens
ctgcagatcaagaggtccc

SEQ ID NO: 68940 - DNA, 20 bp, Homo Sapiens
ctgcagatcaagaggtccct

SEQ ID NO: 68941 - DNA, 20 bp, Homo Sapiens
ctgccacgcgggaggcccgg

SEQ ID NO: 68942 - DNA, 18 bp, Homo Sapiens
ctggactttgaatccagc

SEQ ID NO: 68943 - DNA, 19 bp, Homo Sapiens
ctggactttgaatccagcg

SEQ ID NO: 68944 - DNA, 20 bp, Homo Sapiens
ctggactttgaatccagcga

SEQ ID NO: 68945 - DNA, 16 bp, Homo Sapiens
ctggggattgtgggtt

SEQ ID NO: 68946 - DNA, 24 bp, Homo Sapiens
ctggggattgtgggttcgagtccc

SEQ ID NO: 68947 - DNA, 17 bp, Homo Sapiens
ctgggtagctcagtcgg

SEQ ID NO: 68948 - DNA, 18 bp, Homo Sapiens
ctgggttcgaatcccagc

SEQ ID NO: 68949 - DNA, 16 bp, Homo Sapiens
ctggtggtctagtggc

SEQ ID NO: 68950 - DNA, 16 bp, Homo Sapiens
ctggtggtctagtggt

SEQ ID NO: 68951 - DNA, 16 bp, Homo Sapiens
ctggtgtagtggtatc

SEQ ID NO: 68952 - DNA, 24 bp, Homo Sapiens
ctggtgtagtggtatcatgcaaga

SEQ ID NO: 68953 - DNA, 19 bp, Homo Sapiens
ctgtcacgcgggagaccgg

SEQ ID NO: 68954 - DNA, 20 bp, Homo Sapiens
cttaacacaaagcacccaac

SEQ ID NO: 68955 - DNA, 18 bp, Homo Sapiens
cttaagatccaatggaca

SEQ ID NO: 68956 - DNA, 18 bp, Homo Sapiens
cttaagatccaatggatt

SEQ ID NO: 68957 - DNA, 16 bp, Homo Sapiens
cttacacttaggagat

SEQ ID NO: 68958 - DNA, 20 bp, Homo Sapiens
cttagcattaaccttttaag

SEQ ID NO: 68959 - DNA, 22 bp, Homo Sapiens
cttccaagcagttgacccgggt

SEQ ID NO: 68960 - DNA, 20 bp, Homo Sapiens
cttcggatcagaagattgca

SEQ ID NO: 68961 - DNA, 18 bp, Homo Sapiens
ctttcaccgccgcggccc

SEQ ID NO: 68962 - DNA, 18 bp, Homo Sapiens
ctttgaatccagcgatcc

SEQ ID NO: 68963 - DNA, 19 bp, Homo Sapiens
ctttgaatccagcgatccg

SEQ ID NO: 68964 - DNA, 20 bp, Homo Sapiens
ctttgaatccagcgatccga

SEQ ID NO: 68965 - DNA, 21 bp, Homo Sapiens
ctttgaatccagcgatccgag

SEQ ID NO: 68966 - DNA, 24 bp, Homo Sapiens
ctttgaatccagcgatccgagttc

SEQ ID NO: 68967 - DNA, 25 bp, Homo Sapiens
cttttaagttaaagattaagagaac

SEQ ID NO: 68968 - DNA, 20 bp, Homo Sapiens
gaaccccgtccgtgcctcca

SEQ ID NO: 68969 - DNA, 25 bp, Homo Sapiens
gaagattccaggttcgactcctggc

SEQ ID NO: 68970 - DNA, 22 bp, Homo Sapiens
gaagattgagggttcgagtccc

SEQ ID NO: 68971 - DNA, 23 bp, Homo Sapiens
gaagattgagggttcgagtccct

SEQ ID NO: 68972 - DNA, 25 bp, Homo Sapiens
gaagattgagggttcgagtcccttc

SEQ ID NO: 68973 - DNA, 25 bp, Homo Sapiens
gaagattgcaggttcgagtcctgcc

SEQ ID NO: 68974 - DNA, 18 bp, Homo Sapiens
gaatccagcgatccgagt

SEQ ID NO: 68975 - DNA, 16 bp, Homo Sapiens
gaatctgacaacagag

SEQ ID NO: 68976 - DNA, 24 bp, Homo Sapiens
gacaacattcaaaaaagagtacca

SEQ ID NO: 68977 - DNA, 22 bp, Homo Sapiens
gacccgggttcgattcccgggc

SEQ ID NO: 68978 - DNA, 18 bp, Homo Sapiens
gactcaagttctggtctc

SEQ ID NO: 68979 - DNA, 19 bp, Homo Sapiens
gactcaagttctggtctcc

SEQ ID NO: 68980 - DNA, 21 bp, Homo Sapiens
gactccagatcagaaggctgc

SEQ ID NO: 68981 - DNA, 21 bp, Homo Sapiens
gactccagatcagaaggttgc

SEQ ID NO: 68982 - DNA, 17 bp, Homo Sapiens
gactctgaatccagcga

SEQ ID NO: 68983 - DNA, 19 bp, Homo Sapiens
gacttaagatccaatggac

SEQ ID NO: 68984 - DNA, 16 bp, Homo Sapiens
gacttcggatcagaag

SEQ ID NO: 68985 - DNA, 20 bp, Homo Sapiens
gacttcggatcagaagattg

SEQ ID NO: 68986 - DNA, 17 bp, Homo Sapiens
gagaggtcccgggttca

SEQ ID NO: 68987 - DNA, 19 bp, Homo Sapiens
gagcatgagactcttaatc

SEQ ID NO: 68988 - DNA, 19 bp, Homo Sapiens
gaggtcgatggatcgaaac

SEQ ID NO: 68989 - DNA, 25 bp, Homo Sapiens
gaggttccgggttcgagtcccggca

SEQ ID NO: 68990 - DNA, 17 bp, Homo Sapiens
gagtatccccgcctgtc

SEQ ID NO: 68991 - DNA, 18 bp, Homo Sapiens
gagttcaaatctcggtgg

SEQ ID NO: 68992 - DNA, 22 bp, Homo Sapiens
gagttcgagtctcggtggaacc

SEQ ID NO: 68993 - DNA, 20 bp, Homo Sapiens
gatagctcagttggtagagc

SEQ ID NO: 68994 - DNA, 16 bp, Homo Sapiens
gatccaatggacatat

SEQ ID NO: 68995 - DNA, 21 bp, Homo Sapiens
gatccgagttcaaatctcggt

SEQ ID NO: 68996 - DNA, 22 bp, Homo Sapiens
gattctcgctttgggtgcgaga

SEQ ID NO: 68997 - DNA, 22 bp, Homo Sapiens
gattctcggtttgggtccgaga

SEQ ID NO: 68998 - DNA, 22 bp, Homo Sapiens
gattgtgggttcgagtcccacc

SEQ ID NO: 68999 - DNA, 16 bp, Homo Sapiens
gatttaggctccagtc

SEQ ID NO: 69000 - DNA, 17 bp, Homo Sapiens
gatttgcgttcagttga

SEQ ID NO: 69001 - DNA, 20 bp, Homo Sapiens
gcacccaacttacacttagg

SEQ ID NO: 69002 - DNA, 23 bp, Homo Sapiens
gcactctggactctgaatccagc

SEQ ID NO: 69003 - DNA, 20 bp, Homo Sapiens
gcatgggactcttaatccca

SEQ ID NO: 69004 - DNA, 19 bp, Homo Sapiens
gcatgggactcttaatctc

SEQ ID NO: 69005 - DNA, 19 bp, Homo Sapiens
gcattggacttctaattca

SEQ ID NO: 69006 - DNA, 20 bp, Homo Sapiens
gcattggacttctaattcaa

SEQ ID NO: 69007 - DNA, 18 bp, Homo Sapiens
gcattggcctcctaagcc

SEQ ID NO: 69008 - DNA, 19 bp, Homo Sapiens
gcattggcctcctaagcca

SEQ ID NO: 69009 - DNA, 18 bp, Homo Sapiens
gccaaggtcgcgggttcg

SEQ ID NO: 69010 - DNA, 16 bp, Homo Sapiens
gccagggattgtgggt

SEQ ID NO: 69011 - DNA, 19 bp, Homo Sapiens
gcccagctagctcagtcgg

SEQ ID NO: 69012 - DNA, 25 bp, Homo Sapiens
gcccggctagctcagtcggtagagc

SEQ ID NO: 69013 - DNA, 20 bp, Homo Sapiens
gcccgggttcgattcccggc

SEQ ID NO: 69014 - DNA, 23 bp, Homo Sapiens
gccgaaatagctcagttgggaga

SEQ ID NO: 69015 - DNA, 16 bp, Homo Sapiens
gcctccttagcgcagt

SEQ ID NO: 69016 - DNA, 20 bp, Homo Sapiens
gcctggatagctcagtcggt

SEQ ID NO: 69017 - DNA, 19 bp, Homo Sapiens
gcctggctagctcagtcgg

SEQ ID NO: 69018 - DNA, 20 bp, Homo Sapiens
gcctgggtagctcagtcggt

SEQ ID NO: 69019 - DNA, 17 bp, Homo Sapiens
gcgaaaggtccccggtt

SEQ ID NO: 69020 - DNA, 18 bp, Homo Sapiens
gcgaaaggtccccggttc

SEQ ID NO: 69021 - DNA, 19 bp, Homo Sapiens
gcgaaaggtccccggttcg

SEQ ID NO: 69022 - DNA, 16 bp, Homo Sapiens
gcgagaggtagcggga

SEQ ID NO: 69023 - DNA, 18 bp, Homo Sapiens
gcgagaggtagcgggatc

SEQ ID NO: 69024 - DNA, 18 bp, Homo Sapiens
gcgagaggtcccgggttc

SEQ ID NO: 69025 - DNA, 19 bp, Homo Sapiens
gcgcaggttcgaaccctgc

SEQ ID NO: 69026 - DNA, 19 bp, Homo Sapiens
gcggaagcgtgctgggccc

SEQ ID NO: 69027 - DNA, 18 bp, Homo Sapiens
gcgggttcgatccccgta

SEQ ID NO: 69028 - DNA, 19 bp, Homo Sapiens
gcggttaggattcctggtt

SEQ ID NO: 69029 - DNA, 20 bp, Homo Sapiens
gcgtctgacttcggatcaga

SEQ ID NO: 69030 - DNA, 20 bp, Homo Sapiens
gcgtctgattccggatcaga

SEQ ID NO: 69031 - DNA, 19 bp, Homo Sapiens
gcgtgctgggcccataacc

SEQ ID NO: 69032 - DNA, 20 bp, Homo Sapiens
gcgtgctgggcccataaccc

SEQ ID NO: 69033 - DNA, 22 bp, Homo Sapiens
gcgtgctgggcccataacccag

SEQ ID NO: 69034 - DNA, 20 bp, Homo Sapiens
gctaatccattgtgctttgc

SEQ ID NO: 69035 - DNA, 21 bp, Homo Sapiens
gctccagtggcgcaatcggtt

SEQ ID NO: 69036 - DNA, 19 bp, Homo Sapiens
gctctcaccgccgcggccc

SEQ ID NO: 69037 - DNA, 18 bp, Homo Sapiens
gctggggattgtgggttc

SEQ ID NO: 69038 - DNA, 20 bp, Homo Sapiens
gctgtgatggccgagtggtt

SEQ ID NO: 69039 - DNA, 25 bp, Homo Sapiens
gctgtgatggccgagtggttaaggc

SEQ ID NO: 69040 - DNA, 20 bp, Homo Sapiens
gcttctgtagtgtagtggtt

SEQ ID NO: 69041 - DNA, 19 bp, Homo Sapiens
ggaagcgtgctgggcccat

SEQ ID NO: 69042 - DNA, 16 bp, Homo Sapiens
ggactttgaatccagc

SEQ ID NO: 69043 - DNA, 18 bp, Homo Sapiens
ggactttgaatccagcga

SEQ ID NO: 69044 - DNA, 16 bp, Homo Sapiens
ggagctggggattgtg

SEQ ID NO: 69045 - DNA, 19 bp, Homo Sapiens
ggataaggcatcagcctcc

SEQ ID NO: 69046 - DNA, 18 bp, Homo Sapiens
ggatagctcagtcggtag

SEQ ID NO: 69047 - DNA, 21 bp, Homo Sapiens
ggatagctcagtcggtagagc

SEQ ID NO: 69048 - DNA, 21 bp, Homo Sapiens
ggattgtgggttcgagtccca

SEQ ID NO: 69049 - DNA, 23 bp, Homo Sapiens
ggattgtgggttcgagtcccacc

SEQ ID NO: 69050 - DNA, 23 bp, Homo Sapiens
ggattgtgggttcgagtcccatc

SEQ ID NO: 69051 - DNA, 19 bp, Homo Sapiens
ggcattggcctcctaagcc

SEQ ID NO: 69052 - DNA, 17 bp, Homo Sapiens
ggcccataccccgaaaa

SEQ ID NO: 69053 - DNA, 22 bp, Homo Sapiens
ggccccgggttcgatccccggc

SEQ ID NO: 69054 - DNA, 21 bp, Homo Sapiens
ggcccgggttcgattcccggc

SEQ ID NO: 69055 - DNA, 19 bp, Homo Sapiens
ggccctgtggcttagctgg

SEQ ID NO: 69056 - DNA, 20 bp, Homo Sapiens
ggccctgtggcttagctggt

SEQ ID NO: 69057 - DNA, 19 bp, Homo Sapiens
ggcgccgtggcttagttgg

SEQ ID NO: 69058 - DNA, 17 bp, Homo Sapiens
ggcgcggtggccaagtg

SEQ ID NO: 69059 - DNA, 18 bp, Homo Sapiens
ggcgtctgacttcggatc

SEQ ID NO: 69060 - DNA, 21 bp, Homo Sapiens
ggcgtctgacttcggatcaga

SEQ ID NO: 69061 - DNA, 21 bp, Homo Sapiens
ggcgtctgattccggatcaga

SEQ ID NO: 69062 - DNA, 21 bp, Homo Sapiens
ggcgtgggttcgaatcccacc

SEQ ID NO: 69063 - DNA, 16 bp, Homo Sapiens
ggctagctcagtcggt

SEQ ID NO: 69064 - DNA, 18 bp, Homo Sapiens
ggctagctcagtcggtag

SEQ ID NO: 69065 - DNA, 16 bp, Homo Sapiens
ggctccgtggcttagc

SEQ ID NO: 69066 - DNA, 20 bp, Homo Sapiens
ggctccgtggcttagctggt

SEQ ID NO: 69067 - DNA, 17 bp, Homo Sapiens
gggatgtagctcagtgg

SEQ ID NO: 69068 - DNA, 22 bp, Homo Sapiens
gggattgtgggttcgagtccca

SEQ ID NO: 69069 - DNA, 24 bp, Homo Sapiens
gggattgtgggttcgagtcccacc

SEQ ID NO: 69070 - DNA, 17 bp, Homo Sapiens
gggccagtggcgcaatg

SEQ ID NO: 69071 - DNA, 16 bp, Homo Sapiens
ggggaattagctcaag

SEQ ID NO: 69072 - DNA, 18 bp, Homo Sapiens
gggggcatagctcagtgg

SEQ ID NO: 69073 - DNA, 18 bp, Homo Sapiens
gggggtatagctcagggg

SEQ ID NO: 69074 - DNA, 18 bp, Homo Sapiens
ggggtatgattctcgctt

SEQ ID NO: 69075 - DNA, 17 bp, Homo Sapiens
ggggtgtagctcagtgg

SEQ ID NO: 69076 - DNA, 18 bp, Homo Sapiens
gggtatgattctcgcttc

SEQ ID NO: 69077 - DNA, 20 bp, Homo Sapiens
gggtatgattctcgcttcgg

SEQ ID NO: 69078 - DNA, 20 bp, Homo Sapiens
gggtatgattctcgctttgg

SEQ ID NO: 69079 - DNA, 21 bp, Homo Sapiens
gggtcgtgggttcgagcccca

SEQ ID NO: 69080 - DNA, 17 bp, Homo Sapiens
gggttcaaatcccggac

SEQ ID NO: 69081 - DNA, 22 bp, Homo Sapiens
gggttcgagccccacgttgggc

SEQ ID NO: 69082 - DNA, 16 bp, Homo Sapiens
gggttcgagtcccatc

SEQ ID NO: 69083 - DNA, 16 bp, Homo Sapiens
gggttcgagtcccggc

SEQ ID NO: 69084 - DNA, 17 bp, Homo Sapiens
gggttcgattcccggtc

SEQ ID NO: 69085 - DNA, 19 bp, Homo Sapiens
gggttcgattcccggtcag

SEQ ID NO: 69086 - DNA, 19 bp, Homo Sapiens
ggtagagcatcagactttt

SEQ ID NO: 69087 - DNA, 22 bp, Homo Sapiens
ggtagagcatgggactcttaat

SEQ ID NO: 69088 - DNA, 23 bp, Homo Sapiens
ggtagagcatgggactcttaatc

SEQ ID NO: 69089 - DNA, 24 bp, Homo Sapiens
ggtagagcatgggactcttaatcc

SEQ ID NO: 69090 - DNA, 25 bp, Homo Sapiens
ggtagagcatgggactcttaatccc

SEQ ID NO: 69091 - DNA, 19 bp, Homo Sapiens
ggtagcgtggccgagtggt

SEQ ID NO: 69092 - DNA, 21 bp, Homo Sapiens
ggtagcgtggccgagtggtct

SEQ ID NO: 69093 - DNA, 21 bp, Homo Sapiens
ggtagtgtggccgagcggtct

SEQ ID NO: 69094 - DNA, 18 bp, Homo Sapiens
ggtatgattctcgctttg

SEQ ID NO: 69095 - DNA, 22 bp, Homo Sapiens
ggtccccggttcgaaaccgggc

SEQ ID NO: 69096 - DNA, 23 bp, Homo Sapiens
ggtcccgggttcaaatcccggac

SEQ ID NO: 69097 - DNA, 17 bp, Homo Sapiens
ggtccgagaggtcccgg

SEQ ID NO: 69098 - DNA, 19 bp, Homo Sapiens
ggtcctgagttcgaacctc

SEQ ID NO: 69099 - DNA, 22 bp, Homo Sapiens
ggtcgcgggttcgaaccccgta

SEQ ID NO: 69100 - DNA, 18 bp, Homo Sapiens
ggtcgcgggttcgatccc

SEQ ID NO: 69101 - DNA, 19 bp, Homo Sapiens
ggtcgtgagttcgagcctc

SEQ ID NO: 69102 - DNA, 19 bp, Homo Sapiens
ggtcgtgagttcgatcctc

SEQ ID NO: 69103 - DNA, 22 bp, Homo Sapiens
ggtcgtgggttcgagccccacg

SEQ ID NO: 69104 - DNA, 16 bp, Homo Sapiens
ggtgcgagaggtcccg

SEQ ID NO: 69105 - DNA, 16 bp, Homo Sapiens
ggttagcactctggac

SEQ ID NO: 69106 - DNA, 21 bp, Homo Sapiens
ggttagcactctggactctga

SEQ ID NO: 69107 - DNA, 16 bp, Homo Sapiens
ggttagctcagtcggc

SEQ ID NO: 69108 - DNA, 18 bp, Homo Sapiens
ggttatcacgttcgcctc

SEQ ID NO: 69109 - DNA, 20 bp, Homo Sapiens
ggttatcacgttcgcctcac

SEQ ID NO: 69110 - DNA, 17 bp, Homo Sapiens
ggttcaaatccgggtgc

SEQ ID NO: 69111 - DNA, 18 bp, Homo Sapiens
ggttcaaatccgggtgcc

SEQ ID NO: 69112 - DNA, 19 bp, Homo Sapiens
ggttcaaatccgggtgccc

SEQ ID NO: 69113 - DNA, 18 bp, Homo Sapiens
ggttcagtggtagaattc

SEQ ID NO: 69114 - DNA, 18 bp, Homo Sapiens
ggttccatagtgtagcgg

SEQ ID NO: 69115 - DNA, 18 bp, Homo Sapiens
ggttcgaaaccgggcgga

SEQ ID NO: 69116 - DNA, 16 bp, Homo Sapiens
ggttcgaaccccgtcc

SEQ ID NO: 69117 - DNA, 16 bp, Homo Sapiens
ggttcgatccccgtac

SEQ ID NO: 69118 - DNA, 19 bp, Homo Sapiens
ggttgtgagttcgagcctc

SEQ ID NO: 69119 - DNA, 19 bp, Homo Sapiens
ggttgtgagttcgatcctc

SEQ ID NO: 69120 - DNA, 19 bp, Homo Sapiens
ggttgtgggttcgaatccc

SEQ ID NO: 69121 - DNA, 22 bp, Homo Sapiens
ggttgtgggttcgaatcccacc

SEQ ID NO: 69122 - DNA, 22 bp, Homo Sapiens
ggttgtgggttcgagtcccacc

SEQ ID NO: 69123 - DNA, 18 bp, Homo Sapiens
ggtttccccgcgcaggtt

SEQ ID NO: 69124 - DNA, 23 bp, Homo Sapiens
gtaaacaggagatcctgggttcg

SEQ ID NO: 69125 - DNA, 20 bp, Homo Sapiens
gtaaaccgaagatcacgggt

SEQ ID NO: 69126 - DNA, 18 bp, Homo Sapiens
gtaaaccgaagatcgcgg

SEQ ID NO: 69127 - DNA, 20 bp, Homo Sapiens
gtaaaccgaagatcgcgggt

SEQ ID NO: 69128 - DNA, 18 bp, Homo Sapiens
gtaatggttagcactctg

SEQ ID NO: 69129 - DNA, 18 bp, Homo Sapiens
gtagagcatcagactttt

SEQ ID NO: 69130 - DNA, 19 bp, Homo Sapiens
gtagagcatgagactctta

SEQ ID NO: 69131 - DNA, 20 bp, Homo Sapiens
gtagagcatgagactcttaa

SEQ ID NO: 69132 - DNA, 24 bp, Homo Sapiens
gtagagcatgggactcttaatccc

SEQ ID NO: 69133 - DNA, 17 bp, Homo Sapiens
gtagagcatttgactgc

SEQ ID NO: 69134 - DNA, 16 bp, Homo Sapiens
gtatgattctcgcttc

SEQ ID NO: 69135 - DNA, 20 bp, Homo Sapiens
gtcaggatggccgagtggtc

SEQ ID NO: 69136 - DNA, 24 bp, Homo Sapiens
gtcaggatggccgagtggtctaag

SEQ ID NO: 69137 - DNA, 21 bp, Homo Sapiens
gtccccggttcgaaaccgggc

SEQ ID NO: 69138 - DNA, 21 bp, Homo Sapiens
gtccccggttcgatcccgggc

SEQ ID NO: 69139 - DNA, 21 bp, Homo Sapiens
gtcccgggttcaatccccggc

SEQ ID NO: 69140 - DNA, 21 bp, Homo Sapiens
gtccttgtagtataaactaat

SEQ ID NO: 69141 - DNA, 21 bp, Homo Sapiens
gtcgcgggttcgaaccccgta

SEQ ID NO: 69142 - DNA, 19 bp, Homo Sapiens
gtcgcgggttcgatccccg

SEQ ID NO: 69143 - DNA, 22 bp, Homo Sapiens
gtcggtagagcatcagactttt

SEQ ID NO: 69144 - DNA, 19 bp, Homo Sapiens
gtctctgtggcacaatcgg

SEQ ID NO: 69145 - DNA, 21 bp, Homo Sapiens
gtctctgtggcgcaatcggtt

SEQ ID NO: 69146 - DNA, 18 bp, Homo Sapiens
gtgagtatccccgcctgt

SEQ ID NO: 69147 - DNA, 19 bp, Homo Sapiens
gtgagtatccccgcctgtc

SEQ ID NO: 69148 - DNA, 16 bp, Homo Sapiens
gtgcgagaggtcccgg

SEQ ID NO: 69149 - DNA, 18 bp, Homo Sapiens
gtgctgggcccataaccc

SEQ ID NO: 69150 - DNA, 20 bp, Homo Sapiens
gtgctgggcccataacccag

SEQ ID NO: 69151 - DNA, 18 bp, Homo Sapiens
gtggccgagtggtctaag

SEQ ID NO: 69152 - DNA, 16 bp, Homo Sapiens
gtggtatgattctcgc

SEQ ID NO: 69153 - DNA, 17 bp, Homo Sapiens
gtggtcatcacgttcgc

SEQ ID NO: 69154 - DNA, 17 bp, Homo Sapiens
gtggttaaggcattgga

SEQ ID NO: 69155 - DNA, 21 bp, Homo Sapiens
gtggttagtactctgcgttgt

SEQ ID NO: 69156 - DNA, 17 bp, Homo Sapiens
gtggttatcacgttcgc

SEQ ID NO: 69157 - DNA, 18 bp, Homo Sapiens
gtggttatcacgttcgcc

SEQ ID NO: 69158 - DNA, 19 bp, Homo Sapiens
gtggttatcacgttcgcct

SEQ ID NO: 69159 - DNA, 20 bp, Homo Sapiens
gtggttatcacgttcgcctc

SEQ ID NO: 69160 - DNA, 21 bp, Homo Sapiens
gtgtagtggtatcatgcaaga

SEQ ID NO: 69161 - DNA, 24 bp, Homo Sapiens
gtgtttgtgggtttaagtcccatt

SEQ ID NO: 69162 - DNA, 18 bp, Homo Sapiens
gttaaagactttttctct

SEQ ID NO: 69163 - DNA, 17 bp, Homo Sapiens
gttagcactctggactc

SEQ ID NO: 69164 - DNA, 19 bp, Homo Sapiens
gttatcacgtctgctttac

SEQ ID NO: 69165 - DNA, 21 bp, Homo Sapiens
gttcaaatcccggacgagccc

SEQ ID NO: 69166 - DNA, 17 bp, Homo Sapiens
gttcaaatccgggtgcc

SEQ ID NO: 69167 - DNA, 19 bp, Homo Sapiens
gttcaaatccgggtgcccc

SEQ ID NO: 69168 - DNA, 20 bp, Homo Sapiens
gttcaaatccgggtgccccc

SEQ ID NO: 69169 - DNA, 24 bp, Homo Sapiens
gttcaaatccgggtgccccctcca

SEQ ID NO: 69170 - DNA, 20 bp, Homo Sapiens
gttcaaatctcggtggaacc

SEQ ID NO: 69171 - DNA, 20 bp, Homo Sapiens
gttcaagtccctgttcgggc

SEQ ID NO: 69172 - DNA, 18 bp, Homo Sapiens
gttcaggtcgcagtctcc

SEQ ID NO: 69173 - DNA, 17 bp, Homo Sapiens
gttcgaaaccgggcgga

SEQ ID NO: 69174 - DNA, 18 bp, Homo Sapiens
gttcgaaaccgggcggaa

SEQ ID NO: 69175 - DNA, 20 bp, Homo Sapiens
gttcgaaaccgggcggaaac

SEQ ID NO: 69176 - DNA, 21 bp, Homo Sapiens
gttcgaaaccgggcggaaaca

SEQ ID NO: 69177 - DNA, 23 bp, Homo Sapiens
gttcgaaaccgggcggaaacacc

SEQ ID NO: 69178 - DNA, 24 bp, Homo Sapiens
gttcgagtcccggcagagatgcca

SEQ ID NO: 69179 - DNA, 16 bp, Homo Sapiens
gttcgagtcccttcgt

SEQ ID NO: 69180 - DNA, 16 bp, Homo Sapiens
gttctggtctccaatg

SEQ ID NO: 69181 - DNA, 16 bp, Homo Sapiens
gttctggtctccggat

SEQ ID NO: 69182 - DNA, 24 bp, Homo Sapiens
gttgacccgggttcgattcccggc

SEQ ID NO: 69183 - DNA, 21 bp, Homo Sapiens
gttggtggttcgagcccaccc

SEQ ID NO: 69184 - DNA, 18 bp, Homo Sapiens
gttgtggccgcagcaacc

SEQ ID NO: 69185 - DNA, 21 bp, Homo Sapiens
gttgtgggttcgaatcccacc

SEQ ID NO: 69186 - DNA, 21 bp, Homo Sapiens
gttgtgggttcgagtcccacc

SEQ ID NO: 69187 - DNA, 24 bp, Homo Sapiens
gtttaaccaaaacatcagattgtg

SEQ ID NO: 69188 - DNA, 19 bp, Homo Sapiens
gtttccccgcgcaggttcg

SEQ ID NO: 69189 - DNA, 22 bp, Homo Sapiens
taaaactttacagtcagaggtt

SEQ ID NO: 69190 - DNA, 19 bp, Homo Sapiens
taaaccgaagatcacgggt

SEQ ID NO: 69191 - DNA, 21 bp, Homo Sapiens
taaagacaggggttaggcctc

SEQ ID NO: 69192 - DNA, 18 bp, Homo Sapiens
taacccagaggtcgatgg

SEQ ID NO: 69193 - DNA, 20 bp, Homo Sapiens
taaccgaaaggttggtggtt

SEQ ID NO: 69194 - DNA, 20 bp, Homo Sapiens
taacgccaaggtcgcgggtt

SEQ ID NO: 69195 - DNA, 19 bp, Homo Sapiens
taacttagcattaaccttt

SEQ ID NO: 69196 - DNA, 20 bp, Homo Sapiens
taacttagcattaacctttt

SEQ ID NO: 69197 - DNA, 18 bp, Homo Sapiens
taacttccaattaactag

SEQ ID NO: 69198 - DNA, 22 bp, Homo Sapiens
taagctatcgggcccatacccc

SEQ ID NO: 69199 - DNA, 18 bp, Homo Sapiens
taatccagaggttccggg

SEQ ID NO: 69200 - DNA, 18 bp, Homo Sapiens
taatggataaggcattgg

SEQ ID NO: 69201 - DNA, 17 bp, Homo Sapiens
tagagcatcagactttt

SEQ ID NO: 69202 - DNA, 19 bp, Homo Sapiens
tagagcatgagactcttaa

SEQ ID NO: 69203 - DNA, 21 bp, Homo Sapiens
tagagcatgagactcttaatc

SEQ ID NO: 69204 - DNA, 22 bp, Homo Sapiens
tagagcatgagactcttaatct

SEQ ID NO: 69205 - DNA, 21 bp, Homo Sapiens
tagagcatgggactcttaatc

SEQ ID NO: 69206 - DNA, 22 bp, Homo Sapiens
tagagcatgggactcttaatcc

SEQ ID NO: 69207 - DNA, 23 bp, Homo Sapiens
tagagcatgggactcttaatccc

SEQ ID NO: 69208 - DNA, 16 bp, Homo Sapiens
tagagcatttgactgc

SEQ ID NO: 69209 - DNA, 23 bp, Homo Sapiens
tagcactctggactctgaatcca

SEQ ID NO: 69210 - DNA, 21 bp, Homo Sapiens
tagcggttaggattcctggtt

SEQ ID NO: 69211 - DNA, 17 bp, Homo Sapiens
tagctcagtcggtagag

SEQ ID NO: 69212 - DNA, 19 bp, Homo Sapiens
taggattcggcgctctcac

SEQ ID NO: 69213 - DNA, 17 bp, Homo Sapiens
taggttcgactcctggc

SEQ ID NO: 69214 - DNA, 18 bp, Homo Sapiens
tagtggtatcatgcaaga

SEQ ID NO: 69215 - DNA, 20 bp, Homo Sapiens
tagtggttagtactctgcgt

SEQ ID NO: 69216 - DNA, 23 bp, Homo Sapiens
tatccattggtcttaggccccaa

SEQ ID NO: 69217 - DNA, 25 bp, Homo Sapiens
tatgattctcgcttcgggtgcgaga

SEQ ID NO: 69218 - DNA, 17 bp, Homo Sapiens
tatgattctcgctttgg

SEQ ID NO: 69219 - DNA, 25 bp, Homo Sapiens
tatgattctcgctttgggtgcgaga

SEQ ID NO: 69220 - DNA, 25 bp, Homo Sapiens
tatgattctcggtttgggtccgaga

SEQ ID NO: 69221 - DNA, 18 bp, Homo Sapiens
tcaacttaacttgaccgc

SEQ ID NO: 69222 - DNA, 16 bp, Homo Sapiens
tcaagttctggtctcc

SEQ ID NO: 69223 - DNA, 19 bp, Homo Sapiens
tcacacgcgaaaggtcccc

SEQ ID NO: 69224 - DNA, 20 bp, Homo Sapiens
tcacgcgggagaccggggtt

SEQ ID NO: 69225 - DNA, 18 bp, Homo Sapiens
tcagaagattccaggttc

SEQ ID NO: 69226 - DNA, 18 bp, Homo Sapiens
tcagaagattgagggttc

SEQ ID NO: 69227 - DNA, 17 bp, Homo Sapiens
tcagattgtgaatctga

SEQ ID NO: 69228 - DNA, 20 bp, Homo Sapiens
tcagcctccggagctgggga

SEQ ID NO: 69229 - DNA, 20 bp, Homo Sapiens
tcagctaaataagctatcgg

SEQ ID NO: 69230 - DNA, 17 bp, Homo Sapiens
tcaggtcgcagtctccc

SEQ ID NO: 69231 - DNA, 25 bp, Homo Sapiens
tcagtcggtagagcatcagactttt

SEQ ID NO: 69232 - DNA, 19 bp, Homo Sapiens
tcagtcggtagagcatggg

SEQ ID NO: 69233 - DNA, 23 bp, Homo Sapiens
tcagtggtagagcatttgactgc

SEQ ID NO: 69234 - DNA, 19 bp, Homo Sapiens
tcatgcccccatgtctaac

SEQ ID NO: 69235 - DNA, 19 bp, Homo Sapiens
tccagaggttccgggttcg

SEQ ID NO: 69236 - DNA, 18 bp, Homo Sapiens
tccagatcagaaggctgc

SEQ ID NO: 69237 - DNA, 18 bp, Homo Sapiens
tccagatcagaaggttgc

SEQ ID NO: 69238 - DNA, 21 bp, Homo Sapiens
tccattggtcttaggccccaa

SEQ ID NO: 69239 - DNA, 21 bp, Homo Sapiens
tcccacatggtctagcggtta

SEQ ID NO: 69240 - DNA, 20 bp, Homo Sapiens
tccccggttcgaaaccgggc

SEQ ID NO: 69241 - DNA, 17 bp, Homo Sapiens
tcccggcagagatgcca

SEQ ID NO: 69242 - DNA, 22 bp, Homo Sapiens
tccctgtggtctagtggttagg

SEQ ID NO: 69243 - DNA, 22 bp, Homo Sapiens
tccgtagtgtagtggttatcac

SEQ ID NO: 69244 - DNA, 20 bp, Homo Sapiens
tcctaagccagggattgtgg

SEQ ID NO: 69245 - DNA, 17 bp, Homo Sapiens
tcctcttcttaacacca

SEQ ID NO: 69246 - DNA, 20 bp, Homo Sapiens
tcctgggttcgaatcccagc

SEQ ID NO: 69247 - DNA, 19 bp, Homo Sapiens
tccttaggtcgctggttcg

SEQ ID NO: 69248 - DNA, 16 bp, Homo Sapiens
tcgaaaccgggcggaa

SEQ ID NO: 69249 - DNA, 18 bp, Homo Sapiens
tcgaaaccgggcggaaac

SEQ ID NO: 69250 - DNA, 19 bp, Homo Sapiens
tcgaaaccgggcggaaaca

SEQ ID NO: 69251 - DNA, 22 bp, Homo Sapiens
tcgaaccccgtccgtgcctcca

SEQ ID NO: 69252 - DNA, 19 bp, Homo Sapiens
tcgagcctcacctggagca

SEQ ID NO: 69253 - DNA, 20 bp, Homo Sapiens
tcgcataaaacttaaaactt

SEQ ID NO: 69254 - DNA, 17 bp, Homo Sapiens
tcgctttgggtgcgaga

SEQ ID NO: 69255 - DNA, 17 bp, Homo Sapiens
tcggctgttaaccgaaa

SEQ ID NO: 69256 - DNA, 18 bp, Homo Sapiens
tcgtaaaccgaagatcgc

SEQ ID NO: 69257 - DNA, 20 bp, Homo Sapiens
tcgtatagtggttagtactc

SEQ ID NO: 69258 - DNA, 16 bp, Homo Sapiens
tcgttagcgcagtagg

SEQ ID NO: 69259 - DNA, 20 bp, Homo Sapiens
tctaacaacatggctttctc

SEQ ID NO: 69260 - DNA, 23 bp, Homo Sapiens
tctagcggttaggattcctggtt

SEQ ID NO: 69261 - DNA, 23 bp, Homo Sapiens
tctagtggttaggattcggcgct

SEQ ID NO: 69262 - DNA, 17 bp, Homo Sapiens
tctgaaggtcctgagtt

SEQ ID NO: 69263 - DNA, 23 bp, Homo Sapiens
tctgaatccagcgatccgagttc

SEQ ID NO: 69264 - DNA, 17 bp, Homo Sapiens
tctgacttcggatcaga

SEQ ID NO: 69265 - DNA, 19 bp, Homo Sapiens
tctgcgttgtggccgcagc

SEQ ID NO: 69266 - DNA, 21 bp, Homo Sapiens
tctggactctgaatccagcga

SEQ ID NO: 69267 - DNA, 19 bp, Homo Sapiens
tctggactttgaatccagc

SEQ ID NO: 69268 - DNA, 20 bp, Homo Sapiens
tctggactttgaatccagcg

SEQ ID NO: 69269 - DNA, 21 bp, Homo Sapiens
tctggactttgaatccagcga

SEQ ID NO: 69270 - DNA, 18 bp, Homo Sapiens
tcttaatctcagggtcgt

SEQ ID NO: 69271 - DNA, 18 bp, Homo Sapiens
tcttgcgacccgggttcg

SEQ ID NO: 69272 - DNA, 16 bp, Homo Sapiens
tgaaggtcctgagttc

SEQ ID NO: 69273 - DNA, 17 bp, Homo Sapiens
tgaaggtcctgagttcg

SEQ ID NO: 69274 - DNA, 18 bp, Homo Sapiens
tgacaacagaggcttacg

SEQ ID NO: 69275 - DNA, 16 bp, Homo Sapiens
tgactccagatcagaa

SEQ ID NO: 69276 - DNA, 19 bp, Homo Sapiens
tgactccagatcagaaggc

SEQ ID NO: 69277 - DNA, 20 bp, Homo Sapiens
tgactccagatcagaaggct

SEQ ID NO: 69278 - DNA, 22 bp, Homo Sapiens
tgactccagatcagaaggttgc

SEQ ID NO: 69279 - DNA, 21 bp, Homo Sapiens
tgactgcagatcaagaggtcc

SEQ ID NO: 69280 - DNA, 22 bp, Homo Sapiens
tgactgcagatcaagaggtccc

SEQ ID NO: 69281 - DNA, 16 bp, Homo Sapiens
tgacttcggatcagaa

SEQ ID NO: 69282 - DNA, 21 bp, Homo Sapiens
tgacttcggatcagaagattg

SEQ ID NO: 69283 - DNA, 16 bp, Homo Sapiens
tgagactcttaatctc

SEQ ID NO: 69284 - DNA, 17 bp, Homo Sapiens
tgagggtccagggttca

SEQ ID NO: 69285 - DNA, 19 bp, Homo Sapiens
tgagggttcgagtcccttc

SEQ ID NO: 69286 - DNA, 17 bp, Homo Sapiens
tgagttcgatcctcaca

SEQ ID NO: 69287 - DNA, 16 bp, Homo Sapiens
tgattccggatcagaa

SEQ ID NO: 69288 - DNA, 22 bp, Homo Sapiens
tgattccggatcagaagattga

SEQ ID NO: 69289 - DNA, 23 bp, Homo Sapiens
tgattctcgcttcgggtgcgaga

SEQ ID NO: 69290 - DNA, 23 bp, Homo Sapiens
tgattctcgctttgggtgcgaga

SEQ ID NO: 69291 - DNA, 22 bp, Homo Sapiens
tgattctcggtttgggtccgag

SEQ ID NO: 69292 - DNA, 18 bp, Homo Sapiens
tgccgaggttgtgagttc

SEQ ID NO: 69293 - DNA, 25 bp, Homo Sapiens
tgcgacccgggttcgattcccgggc

SEQ ID NO: 69294 - DNA, 18 bp, Homo Sapiens
tgctaatccattgtgctt

SEQ ID NO: 69295 - DNA, 22 bp, Homo Sapiens
tgctaatggtggagttaaagac

SEQ ID NO: 69296 - DNA, 19 bp, Homo Sapiens
tgctgggcccataacccag

SEQ ID NO: 69297 - DNA, 18 bp, Homo Sapiens
tggactctgaatccagcg

SEQ ID NO: 69298 - DNA, 18 bp, Homo Sapiens
tggactttgaatccagcg

SEQ ID NO: 69299 - DNA, 19 bp, Homo Sapiens
tggactttgaatccagcga

SEQ ID NO: 69300 - DNA, 20 bp, Homo Sapiens
tggataaggcatcagcctcc

SEQ ID NO: 69301 - DNA, 20 bp, Homo Sapiens
tggataaggcgtctgattcc

SEQ ID NO: 69302 - DNA, 18 bp, Homo Sapiens
tggatcgaaaccatcctc

SEQ ID NO: 69303 - DNA, 19 bp, Homo Sapiens
tggatcgaaaccatcctct

SEQ ID NO: 69304 - DNA, 18 bp, Homo Sapiens
tggatttaggctccagtc

SEQ ID NO: 69305 - DNA, 19 bp, Homo Sapiens
tggccgagcggtctaaggc

SEQ ID NO: 69306 - DNA, 17 bp, Homo Sapiens
tggccgagtggttaagg

SEQ ID NO: 69307 - DNA, 18 bp, Homo Sapiens
tggccgagtggttaaggc

SEQ ID NO: 69308 - DNA, 20 bp, Homo Sapiens
tggccgcagcaacctcggtt

SEQ ID NO: 69309 - DNA, 22 bp, Homo Sapiens
tggcgtgggttcgaatcccacc

SEQ ID NO: 69310 - DNA, 16 bp, Homo Sapiens
tgggactcttaatccc

SEQ ID NO: 69311 - DNA, 16 bp, Homo Sapiens
tgggcccataacccag

SEQ ID NO: 69312 - DNA, 17 bp, Homo Sapiens
tgggtgcgagaggtccc

SEQ ID NO: 69313 - DNA, 17 bp, Homo Sapiens
tgggttcgaatcccacc

SEQ ID NO: 69314 - DNA, 18 bp, Homo Sapiens
tgggttcgaatcccatcc

SEQ ID NO: 69315 - DNA, 18 bp, Homo Sapiens
tgggttcgagccccacgt

SEQ ID NO: 69316 - DNA, 20 bp, Homo Sapiens
tggtagagcatttgactgca

SEQ ID NO: 69317 - DNA, 20 bp, Homo Sapiens
tggtagagcgcatgctttgc

SEQ ID NO: 69318 - DNA, 16 bp, Homo Sapiens
tggtatagtggtaagc

SEQ ID NO: 69319 - DNA, 16 bp, Homo Sapiens
tggtcatcacgttcgc

SEQ ID NO: 69320 - DNA, 17 bp, Homo Sapiens
tggtcatcacgttcgcc

SEQ ID NO: 69321 - DNA, 16 bp, Homo Sapiens
tggtctagcggttagg

SEQ ID NO: 69322 - DNA, 19 bp, Homo Sapiens
tggtgcaactccaaataaa

SEQ ID NO: 69323 - DNA, 24 bp, Homo Sapiens
tggtggagttaaagactttttctc

SEQ ID NO: 69324 - DNA, 18 bp, Homo Sapiens
tggtggtctagtggttag

SEQ ID NO: 69325 - DNA, 20 bp, Homo Sapiens
tggtggttcagtggtagaat

SEQ ID NO: 69326 - DNA, 21 bp, Homo Sapiens
tggttatcacgtctgctttac

SEQ ID NO: 69327 - DNA, 18 bp, Homo Sapiens
tggttatcacgttcgcct

SEQ ID NO: 69328 - DNA, 19 bp, Homo Sapiens
tggttatcacgttcgcctc

SEQ ID NO: 69329 - DNA, 20 bp, Homo Sapiens
tggttatcacgttcgcctca

SEQ ID NO: 69330 - DNA, 21 bp, Homo Sapiens
tggttatcacgttcgcctcac

SEQ ID NO: 69331 - DNA, 19 bp, Homo Sapiens
tggttcaaatccgggtgcc

SEQ ID NO: 69332 - DNA, 18 bp, Homo Sapiens
tggttcagtggtagaatt

SEQ ID NO: 69333 - DNA, 16 bp, Homo Sapiens
tggttcgagcccaccc

SEQ ID NO: 69334 - DNA, 17 bp, Homo Sapiens
tggttttcacccaggtg

SEQ ID NO: 69335 - DNA, 23 bp, Homo Sapiens
tgtagcggttatcacattcgcct

SEQ ID NO: 69336 - DNA, 23 bp, Homo Sapiens
tgtagtggttatcacgttcgcct

SEQ ID NO: 69337 - DNA, 18 bp, Homo Sapiens
tgtctaacaacatggctt

SEQ ID NO: 69338 - DNA, 20 bp, Homo Sapiens
tgtctaacaacatggctttc

SEQ ID NO: 69339 - DNA, 21 bp, Homo Sapiens
tgtctaacaacatggctttct

SEQ ID NO: 69340 - DNA, 19 bp, Homo Sapiens
tgtgagttcgagcctcacc

SEQ ID NO: 69341 - DNA, 22 bp, Homo Sapiens
ttaaccaaaacatcagattgtg

SEQ ID NO: 69342 - DNA, 21 bp, Homo Sapiens
ttaaccgaaaggttggtggtt

SEQ ID NO: 69343 - DNA, 19 bp, Homo Sapiens
ttaacttccaattaactag

SEQ ID NO: 69344 - DNA, 22 bp, Homo Sapiens
ttaagttaaagattaagagaac

SEQ ID NO: 69345 - DNA, 16 bp, Homo Sapiens
ttaatcccagggtcgt

SEQ ID NO: 69346 - DNA, 20 bp, Homo Sapiens
ttagaatcttagctttgggt

SEQ ID NO: 69347 - DNA, 18 bp, Homo Sapiens
ttagggtgcttagctgtt

SEQ ID NO: 69348 - DNA, 18 bp, Homo Sapiens
ttatcacgttcgcctcac

SEQ ID NO: 69349 - DNA, 20 bp, Homo Sapiens
ttcaaatcccggacgagccc

SEQ ID NO: 69350 - DNA, 18 bp, Homo Sapiens
ttcaaatctcggtggaac

SEQ ID NO: 69351 - DNA, 22 bp, Homo Sapiens
ttcagtggtagaattctcgcct

SEQ ID NO: 69352 - DNA, 22 bp, Homo Sapiens
ttcatatcattggtcgtggttg

SEQ ID NO: 69353 - DNA, 20 bp, Homo Sapiens
ttccgtagtgtagtggttat

SEQ ID NO: 69354 - DNA, 16 bp, Homo Sapiens
ttcgaaaccgggcgga

SEQ ID NO: 69355 - DNA, 19 bp, Homo Sapiens
ttcgaaaccgggcggaaac

SEQ ID NO: 69356 - DNA, 20 bp, Homo Sapiens
ttcgaaaccgggcggaaaca

SEQ ID NO: 69357 - DNA, 22 bp, Homo Sapiens
ttcgagcccacccagggacgcc

SEQ ID NO: 69358 - DNA, 19 bp, Homo Sapiens
ttcgagcctcacctggagc

SEQ ID NO: 69359 - DNA, 20 bp, Homo Sapiens
ttcgagcctcacctggagca

SEQ ID NO: 69360 - DNA, 22 bp, Homo Sapiens
ttcgagcctcacctggagcacc

SEQ ID NO: 69361 - DNA, 17 bp, Homo Sapiens
ttcggatcagaagattg

SEQ ID NO: 69362 - DNA, 18 bp, Homo Sapiens
ttcggatcagaagattga

SEQ ID NO: 69363 - DNA, 20 bp, Homo Sapiens
ttctaggttcgactcctggc

SEQ ID NO: 69364 - DNA, 21 bp, Homo Sapiens
ttgaatccagcgatccgagtt

SEQ ID NO: 69365 - DNA, 17 bp, Homo Sapiens
ttgactgcagatcaaga

SEQ ID NO: 69366 - DNA, 17 bp, Homo Sapiens
ttgagggttcgaatccc

SEQ ID NO: 69367 - DNA, 20 bp, Homo Sapiens
ttgagggttcgaatcccttc

SEQ ID NO: 69368 - DNA, 20 bp, Homo Sapiens
ttgcaggttcgagtcctgcc

SEQ ID NO: 69369 - DNA, 16 bp, Homo Sapiens
ttgcgacccgggttcg

SEQ ID NO: 69370 - DNA, 16 bp, Homo Sapiens
ttggtggtatagtggt

SEQ ID NO: 69371 - DNA, 20 bp, Homo Sapiens
ttggtggttcgagcccaccc

SEQ ID NO: 69372 - DNA, 17 bp, Homo Sapiens
ttgtaaaccggagatga

SEQ ID NO: 69373 - DNA, 20 bp, Homo Sapiens
ttgtgagttcgagcctcacc

SEQ ID NO: 69374 - DNA, 20 bp, Homo Sapiens
ttgtgggttcgaatcccacc

SEQ ID NO: 69375 - DNA, 23 bp, Homo Sapiens
tttaaccaaaacatcagattgtg

SEQ ID NO: 69376 - DNA, 19 bp, Homo Sapiens
tttacacgcagaaggtcct

SEQ ID NO: 69377 - DNA, 22 bp, Homo Sapiens
tttagacgggctcacatcaccc

SEQ ID NO: 69378 - DNA, 19 bp, Homo Sapiens
tttaggctccagtcatttc

SEQ ID NO: 69379 - DNA, 18 bp, Homo Sapiens
tttgcgttcagttgatgc

SEQ ID NO: 69380 - DNA, 21 bp, Homo Sapiens
tttggggggttcgattccttc

SEQ ID NO: 69381 - DNA, 18 bp, Homo Sapiens
ttttcacccaggcggccc

SEQ ID NO: 69382 - DNA, 23 bp, Homo Sapiens
aaacaaaacgaatgatttcgact

SEQ ID NO: 69383 - DNA, 25 bp, Homo Sapiens
aaataagctatcgggcccatacccc

SEQ ID NO: 69384 - DNA, 21 bp, Homo Sapiens
aaattataggctaaatcctat

SEQ ID NO: 69385 - DNA, 22 bp, Homo Sapiens
aacaaaacgaatgatttcgact

SEQ ID NO: 69386 - DNA, 18 bp, Homo Sapiens
aaccagctttggggggtt

SEQ ID NO: 69387 - DNA, 19 bp, Homo Sapiens
aacccagaggtcgatggat

SEQ ID NO: 69388 - DNA, 19 bp, Homo Sapiens
aaccgaaaggttggtggtt

SEQ ID NO: 69389 - DNA, 18 bp, Homo Sapiens
aactcatgcccccatgtc

SEQ ID NO: 69390 - DNA, 20 bp, Homo Sapiens
aactcatgcccccatgtcta

SEQ ID NO: 69391 - DNA, 21 bp, Homo Sapiens
aagctatcgggcccatacccc

SEQ ID NO: 69392 - DNA, 22 bp, Homo Sapiens
aagggcttagcttaattaaagt

SEQ ID NO: 69393 - DNA, 23 bp, Homo Sapiens
aagggcttagcttaattaaagtg

SEQ ID NO: 69394 - DNA, 25 bp, Homo Sapiens
aatggtggagttaaagactttttct

SEQ ID NO: 69395 - DNA, 21 bp, Homo Sapiens
aattataggctaaatcctata

SEQ ID NO: 69396 - DNA, 21 bp, Homo Sapiens
acaaaacgaatgatttcgact

SEQ ID NO: 69397 - DNA, 22 bp, Homo Sapiens
acaaagcacccaacttacactt

SEQ ID NO: 69398 - DNA, 25 bp, Homo Sapiens
acaaagcacccaacttacacttagg

SEQ ID NO: 69399 - DNA, 21 bp, Homo Sapiens
acaacgatggtttttcatatc

SEQ ID NO: 69400 - DNA, 25 bp, Homo Sapiens
acagtcagaggttcaattcctcttc

SEQ ID NO: 69401 - DNA, 19 bp, Homo Sapiens
acatatgtccgcgtgggtt

SEQ ID NO: 69402 - DNA, 18 bp, Homo Sapiens
accgaaaggttggtggtt

SEQ ID NO: 69403 - DNA, 21 bp, Homo Sapiens
actgaaaatgtttagacgggc

SEQ ID NO: 69404 - DNA, 23 bp, Homo Sapiens
agaaatttaggttaaatacagac

SEQ ID NO: 69405 - DNA, 18 bp, Homo Sapiens
agaaccaacacctcttta

SEQ ID NO: 69406 - DNA, 19 bp, Homo Sapiens
agagaaccaacacctcttt

SEQ ID NO: 69407 - DNA, 19 bp, Homo Sapiens
aggcatcagcctccggagc

SEQ ID NO: 69408 - DNA, 19 bp, Homo Sapiens
aggtggccgagtggttaag

SEQ ID NO: 69409 - DNA, 21 bp, Homo Sapiens
agtcgatagagcatgagactc

SEQ ID NO: 69410 - DNA, 21 bp, Homo Sapiens
agtctcttcgggggcgtgggt

SEQ ID NO: 69411 - DNA, 18 bp, Homo Sapiens
agttaaagactttttctc

SEQ ID NO: 69412 - DNA, 25 bp, Homo Sapiens
agttctggtctccggatggaggcgt

SEQ ID NO: 69413 - DNA, 19 bp, Homo Sapiens
atacaacgatggtttttca

SEQ ID NO: 69414 - DNA, 18 bp, Homo Sapiens
atattgaattgcaaattc

SEQ ID NO: 69415 - DNA, 19 bp, Homo Sapiens
atcggttagcgcgcggtac

SEQ ID NO: 69416 - DNA, 16 bp, Homo Sapiens
attgagggttcgagtc

SEQ ID NO: 69417 - DNA, 23 bp, Homo Sapiens
atttcataactttgtcaaagtta

SEQ ID NO: 69418 - DNA, 23 bp, Homo Sapiens
caaaacatcagattgtgaatctg

SEQ ID NO: 69419 - DNA, 22 bp, Homo Sapiens
caaagcacccaacttacactta

SEQ ID NO: 69420 - DNA, 18 bp, Homo Sapiens
caattaactagttttgac

SEQ ID NO: 69421 - DNA, 25 bp, Homo Sapiens
caattaactagttttgacaacattc

SEQ ID NO: 69422 - DNA, 21 bp, Homo Sapiens
cactctggactctgaatccag

SEQ ID NO: 69423 - DNA, 18 bp, Homo Sapiens
cagaccaagagccttcaa

SEQ ID NO: 69424 - DNA, 20 bp, Homo Sapiens
cagctaaataagctatcggg

SEQ ID NO: 69425 - DNA, 22 bp, Homo Sapiens
cataacccagaggtcgatggat

SEQ ID NO: 69426 - DNA, 19 bp, Homo Sapiens
catattgaattgcaaattc

SEQ ID NO: 69427 - DNA, 19 bp, Homo Sapiens
ccaacacctctttacagtg

SEQ ID NO: 69428 - DNA, 18 bp, Homo Sapiens
cccaacttacacttagga

SEQ ID NO: 69429 - DNA, 21 bp, Homo Sapiens
cccataacccagaggtcgatg

SEQ ID NO: 69430 - DNA, 20 bp, Homo Sapiens
cccgaaaatgttggttatac

SEQ ID NO: 69431 - DNA, 21 bp, Homo Sapiens
cccgaaaatgttggttatacc

SEQ ID NO: 69432 - DNA, 20 bp, Homo Sapiens
ccggctagctcagtcggtag

SEQ ID NO: 69433 - DNA, 18 bp, Homo Sapiens
cctgggtagctcagtcgg

SEQ ID NO: 69434 - DNA, 22 bp, Homo Sapiens
cgaaaatgttggttataccctt

SEQ ID NO: 69435 - DNA, 21 bp, Homo Sapiens
cgactcctggctggctcgcca

SEQ ID NO: 69436 - DNA, 20 bp, Homo Sapiens
cgggctcacatcaccccata

SEQ ID NO: 69437 - DNA, 21 bp, Homo Sapiens
cggtaatcgcataaaacttaa

SEQ ID NO: 69438 - DNA, 17 bp, Homo Sapiens
cggttagcgcgcggtac

SEQ ID NO: 69439 - DNA, 24 bp, Homo Sapiens
cgtgatcgtatagtggttagtact

SEQ ID NO: 69440 - DNA, 21 bp, Homo Sapiens
ctaagccagggattgtgggtt

SEQ ID NO: 69441 - DNA, 20 bp, Homo Sapiens
ctatccattggtcttaggcc

SEQ ID NO: 69442 - DNA, 22 bp, Homo Sapiens
ctcacaagaactgctaactcat

SEQ ID NO: 69443 - DNA, 19 bp, Homo Sapiens
ctcatgcccccatgtctaa

SEQ ID NO: 69444 - DNA, 19 bp, Homo Sapiens
ctctgtggcgcaatggacg

SEQ ID NO: 69445 - DNA, 21 bp, Homo Sapiens
ctcttaatcccagggtcgtgg

SEQ ID NO: 69446 - DNA, 24 bp, Homo Sapiens
ctgacaacagaggcttacgacccc

SEQ ID NO: 69447 - DNA, 20 bp, Homo Sapiens
cttaagatccaatggacata

SEQ ID NO: 69448 - DNA, 23 bp, Homo Sapiens
cttacacttaggagatttcaact

SEQ ID NO: 69449 - DNA, 20 bp, Homo Sapiens
cttacgaccccttatttacc

SEQ ID NO: 69450 - DNA, 23 bp, Homo Sapiens
gactcaagttctggtctccggat

SEQ ID NO: 69451 - DNA, 19 bp, Homo Sapiens
gagaaccaacacctcttta

SEQ ID NO: 69452 - DNA, 19 bp, Homo Sapiens
gcccggctagctcagtcga

SEQ ID NO: 69453 - DNA, 21 bp, Homo Sapiens
gccgaaatagctcagttggga

SEQ ID NO: 69454 - DNA, 19 bp, Homo Sapiens
gccgagatagctcagttgg

SEQ ID NO: 69455 - DNA, 17 bp, Homo Sapiens
gcgagaggtagcgggat

SEQ ID NO: 69456 - DNA, 23 bp, Homo Sapiens
gctcagtcggtagagcatcagac

SEQ ID NO: 69457 - DNA, 21 bp, Homo Sapiens
gcttacgaccccttatttacc

SEQ ID NO: 69458 - DNA, 20 bp, Homo Sapiens
ggctccgtggcgcaatggat

SEQ ID NO: 69459 - DNA, 18 bp, Homo Sapiens
gggggtatagctcagcgg

SEQ ID NO: 69460 - DNA, 22 bp, Homo Sapiens
ggtggagttaaagactttttct

SEQ ID NO: 69461 - DNA, 20 bp, Homo Sapiens
ggtggtctagtggttaggat

SEQ ID NO: 69462 - DNA, 16 bp, Homo Sapiens
ggttagcgcgcggtac

SEQ ID NO: 69463 - DNA, 20 bp, Homo Sapiens
ggttagtactctgcgttgtg

SEQ ID NO: 69464 - DNA, 20 bp, Homo Sapiens
ggttccatagtgtagcggtt

SEQ ID NO: 69465 - DNA, 19 bp, Homo Sapiens
gtctctgtggtgcaatcgg

SEQ ID NO: 69466 - DNA, 19 bp, Homo Sapiens
gttagtactctgcgttgtg

SEQ ID NO: 69467 - DNA, 19 bp, Homo Sapiens
gttcaaatctcgctggggc

SEQ ID NO: 69468 - DNA, 20 bp, Homo Sapiens
gttcgaatccgagtcacggc

SEQ ID NO: 69469 - DNA, 23 bp, Homo Sapiens
taaacaaaacgaatgatttcgac

SEQ ID NO: 69470 - DNA, 24 bp, Homo Sapiens
taaacaaaacgaatgatttcgact

SEQ ID NO: 69471 - DNA, 24 bp, Homo Sapiens
taaccaaaacatcagattgtgaat

SEQ ID NO: 69472 - DNA, 20 bp, Homo Sapiens
taactaagtgtttgtgggtt

SEQ ID NO: 69473 - DNA, 20 bp, Homo Sapiens
taactcatgcccccatgtct

SEQ ID NO: 69474 - DNA, 16 bp, Homo Sapiens
taagtgtttgtgggtt

SEQ ID NO: 69475 - DNA, 21 bp, Homo Sapiens
taatggtggagttaaagactt

SEQ ID NO: 69476 - DNA, 22 bp, Homo Sapiens
tacctcctcaaagcaatacact

SEQ ID NO: 69477 - DNA, 21 bp, Homo Sapiens
tagcactctggactctgaatc

SEQ ID NO: 69478 - DNA, 24 bp, Homo Sapiens
taggagatttcaacttaacttgac

SEQ ID NO: 69479 - DNA, 20 bp, Homo Sapiens
tatccattggtcttaggccc

SEQ ID NO: 69480 - DNA, 22 bp, Homo Sapiens
tatccattggtcttaggcccca

SEQ ID NO: 69481 - DNA, 22 bp, Homo Sapiens
tcaaatcccggacgagccccca

SEQ ID NO: 69482 - DNA, 21 bp, Homo Sapiens
tcacaagaactgctaactcat

SEQ ID NO: 69483 - DNA, 18 bp, Homo Sapiens
tccagtggcgcaatcggt

SEQ ID NO: 69484 - DNA, 17 bp, Homo Sapiens
tcccattggtctagcca

SEQ ID NO: 69485 - DNA, 20 bp, Homo Sapiens
tccggatggaggcgtgggtt

SEQ ID NO: 69486 - DNA, 22 bp, Homo Sapiens
tcgagccccagtggaaccacca

SEQ ID NO: 69487 - DNA, 18 bp, Homo Sapiens
tcggttagcgcgcggtac

SEQ ID NO: 69488 - DNA, 23 bp, Homo Sapiens
tcgtggttgtagtccgtgcgaga

SEQ ID NO: 69489 - DNA, 23 bp, Homo Sapiens
tgacaacagaggcttacgacccc

SEQ ID NO: 69490 - DNA, 22 bp, Homo Sapiens
tgattctcgcttcgggtgtgag

SEQ ID NO: 69491 - DNA, 21 bp, Homo Sapiens
tgattctcggtttgggtccga

SEQ ID NO: 69492 - DNA, 20 bp, Homo Sapiens
tgatttgcgttcagttgatg

SEQ ID NO: 69493 - DNA, 21 bp, Homo Sapiens
tgatttgcgttcagttgatgc

SEQ ID NO: 69494 - DNA, 23 bp, Homo Sapiens
tgctaatccattgtgctttgcac

SEQ ID NO: 69495 - DNA, 18 bp, Homo Sapiens
tgctaatggtggagttaa

SEQ ID NO: 69496 - DNA, 21 bp, Homo Sapiens
tggattcatatccgcgtgggt

SEQ ID NO: 69497 - DNA, 20 bp, Homo Sapiens
tggggtctccccgcgcaggt

SEQ ID NO: 69498 - DNA, 19 bp, Homo Sapiens
tggggtgtgataggtggca

SEQ ID NO: 69499 - DNA, 21 bp, Homo Sapiens
tggtggagttaaagacttttt

SEQ ID NO: 69500 - DNA, 24 bp, Homo Sapiens
tggttagtactctgcgttgtggcc

SEQ ID NO: 69501 - DNA, 25 bp, Homo Sapiens
tgtttagacgggctcacatcacccc

SEQ ID NO: 69502 - DNA, 25 bp, Homo Sapiens
ttaaattataggctaaatcctatat

SEQ ID NO: 69503 - DNA, 21 bp, Homo Sapiens
ttaagttaaagattaagagaa

SEQ ID NO: 69504 - DNA, 25 bp, Homo Sapiens
ttagaatcttagctttgggtgctaa

SEQ ID NO: 69505 - DNA, 24 bp, Homo Sapiens
ttagacgggctcacatcaccccat

SEQ ID NO: 69506 - DNA, 21 bp, Homo Sapiens
ttcataactttgtcaaagtta

SEQ ID NO: 69507 - DNA, 17 bp, Homo Sapiens
ttcatatccgcgtgggt

SEQ ID NO: 69508 - DNA, 21 bp, Homo Sapiens
ttcgagcccacccagggacgc

SEQ ID NO: 69509 - DNA, 19 bp, Homo Sapiens
ttcgagccccacgttgggc

SEQ ID NO: 69510 - DNA, 22 bp, Homo Sapiens
tttaaccaaaacatcagattgt

SEQ ID NO: 69511 - DNA, 23 bp, Homo Sapiens
tttagacgggctcacatcacccc

SEQ ID NO: 69512 - DNA, 16 bp, Homo Sapiens
tttcgactcattaaat
